United States Patent Application Publication US 2022/0132862 A1 - sequence listing, part 3

SEQ ID NO: 1 - DNA, 6090158 bp, Pseudomonas sp. (residues 4,060,107-6,090,158 of 6,090,158)
  misc_feature (1)..(40): n is a, c, g, or t
  misc_feature (32029)..(32267): n is a, c, g, or t
  misc_feature (266259)..(266298): n is a, c, g, or t
  misc_feature (308738)..(308777): n is a, c, g, or t
  misc_feature (366282)..(366321): n is a, c, g, or t
  misc_feature (485794)..(485833): n is a, c, g, or t
  misc_feature (490635)..(490674): n is a, c, g, or t
  misc_feature (609891)..(609930): n is a, c, g, or t
  misc_feature (617018)..(617057): n is a, c, g, or t
  misc_feature (696285)..(696324): n is a, c, g, or t
  misc_feature (735386)..(735425): n is a, c, g, or t
  misc_feature (864787)..(864826): n is a, c, g, or t
  misc_feature (902670)..(902709): n is a, c, g, or t
  misc_feature (910376)..(910415): n is a, c, g, or t
  misc_feature (954467)..(954506): n is a, c, g, or t
  misc_feature (987109)..(987148): n is a, c, g, or t
  misc_feature (1037321)..(1037360): n is a, c, g, or t
  misc_feature (1067930)..(1067969): n is a, c, g, or t
  misc_feature (1154621)..(1154660): n is a, c, g, or t
  misc_feature (1209285)..(1209324): n is a, c, g, or t
  misc_feature (1258184)..(1258223): n is a, c, g, or t
  misc_feature (1260899)..(1260938): n is a, c, g, or t
  misc_feature (1279229)..(1279238): n is a, c, g, or t
  misc_feature (1302655)..(1302694): n is a, c, g, or t
  misc_feature (1340253)..(1340292): n is a, c, g, or t
  misc_feature (1358997)..(1359036): n is a, c, g, or t
  misc_feature (1453806)..(1453845): n is a, c, g, or t
  misc_feature (1479493)..(1479532): n is a, c, g, or t
  misc_feature (1587608)..(1587647): n is a, c, g, or t
  misc_feature (1645941)..(1645980): n is a, c, g, or t
  misc_feature (1662443)..(1662482): n is a, c, g, or t
  misc_feature (1686349)..(1686388): n is a, c, g, or t
  misc_feature (1713675)..(1713714): n is a, c, g, or t
  misc_feature (1735046)..(1735085): n is a, c, g, or t
  misc_feature (1744847)..(1744886): n is a, c, g, or t
  misc_feature (1807249)..(1807288): n is a, c, g, or t
  misc_feature (1817496)..(1817535): n is a, c, g, or t
  misc_feature (1898481)..(1898520): n is a, c, g, or t
  misc_feature (1926437)..(1926476): n is a, c, g, or t
  misc_feature (1942893)..(1942932): n is a, c, g, or t
  misc_feature (1980753)..(1980792): n is a, c, g, or t
  misc_feature (1989098)..(1989137): n is a, c, g, or t
  misc_feature (2063947)..(2063986): n is a, c, g, or t
  misc_feature (2138416)..(2138455): n is a, c, g, or t
  misc_feature (2162477)..(2162516): n is a, c, g, or t
  misc_feature (2203782)..(2203821): n is a, c, g, or t
  misc_feature (2282262)..(2282301): n is a, c, g, or t
  misc_feature (2301355)..(2301394): n is a, c, g, or t
  misc_feature (2329748)..(2329787): n is a, c, g, or t
  misc_feature (2378305)..(2378344): n is a, c, g, or t
  misc_feature (2468632)..(2468671): n is a, c, g, or t
  misc_feature (2483870)..(2483909): n is a, c, g, or t
  misc_feature (2493763)..(2493802): n is a, c, g, or t
  misc_feature (2517815)..(2517854): n is a, c, g, or t
  misc_feature (2534247)..(2534286): n is a, c, g, or t
  misc_feature (2574050)..(2574089): n is a, c, g, or t
  misc_feature (2615359)..(2615398): n is a, c, g, or t
  misc_feature (2624399)..(2624438): n is a, c, g, or t
  misc_feature (2654015)..(2654054): n is a, c, g, or t
  misc_feature (2739383)..(2739422): n is a, c, g, or t
  misc_feature (2755327)..(2755366): n is a, c, g, or t
  misc_feature (2762142)..(2762181): n is a, c, g, or t
  misc_feature (2798011)..(2798050): n is a, c, g, or t
  misc_feature (2836580)..(2836619): n is a, c, g, or t
  misc_feature (2884822)..(2884861): n is a, c, g, or t
  misc_feature (2896718)..(2896757): n is a, c, g, or t
  misc_feature (2940973)..(2941012): n is a, c, g, or t
  misc_feature (2956379)..(2956418): n is a, c, g, or t
  misc_feature (3002822)..(3002831): n is a, c, g, or t
  misc_feature (3014311)..(3014350): n is a, c, g, or t
  misc_feature (3021511)..(3021550): n is a, c, g, or t
  misc_feature (3056166)..(3056205): n is a, c, g, or t
  misc_feature (3102840)..(3102879): n is a, c, g, or t
  misc_feature (3198223)..(3198262): n is a, c, g, or t
  misc_feature (3267524)..(3267563): n is a, c, g, or t
  misc_feature (3345707)..(3345746): n is a, c, g, or t
  misc_feature (3403966)..(3404005): n is a, c, g, or t
  misc_feature (3440934)..(3440973): n is a, c, g, or t
  misc_feature (3482847)..(3482886): n is a, c, g, or t
  misc_feature (3566433)..(3566472): n is a, c, g, or t
  misc_feature (3600655)..(3600694): n is a, c, g, or t
  misc_feature (3632605)..(3632644): n is a, c, g, or t
  misc_feature (3669417)..(3669456): n is a, c, g, or t
  misc_feature (3687113)..(3687152): n is a, c, g, or t
  misc_feature (3721720)..(3721759): n is a, c, g, or t
  misc_feature (3743749)..(3743788): n is a, c, g, or t
  misc_feature (3798737)..(3798776): n is a, c, g, or t
  misc_feature (3870931)..(3870970): n is a, c, g, or t
  misc_feature (3924159)..(3924168): n is a, c, g, or t
  misc_feature (3931557)..(3931596): n is a, c, g, or t
  misc_feature (3971507)..(3971546): n is a, c, g, or t
  misc_feature (3977953)..(3977992): n is a, c, g, or t
  misc_feature (4019490)..(4019529): n is a, c, g, or t
  misc_feature (4042513)..(4042552): n is a, c, g, or t
  misc_feature (4067134)..(4067173): n is a, c, g, or t
  misc_feature (4120022)..(4120061): n is a, c, g, or t
  misc_feature (4177779)..(4177818): n is a, c, g, or t
  misc_feature (4205043)..(4205082): n is a, c, g, or t
  misc_feature (4380475)..(4380514): n is a, c, g, or t
  misc_feature (4498798)..(4498837): n is a, c, g, or t
  misc_feature (4626845)..(4626884): n is a, c, g, or t
  misc_feature (4637477)..(4637516): n is a, c, g, or t
  misc_feature (4660957)..(4660996): n is a, c, g, or t
  misc_feature (4681587)..(4681626): n is a, c, g, or t
  misc_feature (4729600)..(4729639): n is a, c, g, or t
  misc_feature (4748301)..(4748340): n is a, c, g, or t
  misc_feature (4768545)..(4768584): n is a, c, g, or t
  misc_feature (4844471)..(4844510): n is a, c, g, or t
  misc_feature (4893964)..(4894003): n is a, c, g, or t
  misc_feature (4913205)..(4913244): n is a, c, g, or t
  misc_feature (4936516)..(4936555): n is a, c, g, or t
  misc_feature (4948055)..(4948094): n is a, c, g, or t
  misc_feature (4959550)..(4959589): n is a, c, g, or t
  misc_feature (5043487)..(5043526): n is a, c, g, or t
  misc_feature (5105732)..(5105901): n is a, c, g, or t
  misc_feature (5188411)..(5188450): n is a, c, g, or t
  misc_feature (5293493)..(5293532): n is a, c, g, or t
  misc_feature (5369254)..(5369293): n is a, c, g, or t
  misc_feature (5392057)..(5392096): n is a, c, g, or t
  misc_feature (5511631)..(5511670): n is a, c, g, or t
  misc_feature (5656594)..(5656633): n is a, c, g, or t
  misc_feature (5799509)..(5799548): n is a, c, g, or t
  misc_feature (5938008)..(5938047): n is a, c, g, or t
  misc_feature (5979513)..(5979552): n is a, c, g, or t
ggcgtgggcctgggctgggaaatgttcgcgttgcaaccacgggccttcgctgaaggggatctgctcccaggacaccgccagtggattacgcaaatgcctggaataacctggatgcaacagctccacggcgtgtcgggaggcggcgtactgctgatcgagcggttgggcgccaaacacgtcggcgccctcgcccgtcacgtaaccggccaccagcacgccttcgcgggtgttgaggtcgttgctggggtaccacagcaggcgcgccgggtgttcgatccacgacaggccgccataggtgcggtagtcggtctcccaaaagcgcggcgattgccaggccaccttggtcgcctggtcgctgcgagtgctgagcagggccgccttgaccggtgcgctgaagtccgtatcgagcttggccagcaggggcagcggcacggtggagatcagaaagtcggcacgcaccacctgttcacggccactgtgctggtcgtggtaggtcaccgccacgccgtcctccagctggcggatctgccgcacctgggcgcccagttgcacctgctcctgcacgcgtcggtagaaggcctcggtgatacggtccatgccgcccaccggctggaacatggtggccgagaattccgggaattcggtgtgtaacagagcgccccagagttccgggtgcagcaagcggtccaaccccagcggtatatggcgggcgggcaaggcgccagggtgggcggcagattcaaggtgcccggagcgtagggtgccttcaaaagccagctcttgggacaggtcaccgtacacctgcaaaaaaccgagcagacgtgtgcgctcttcgccacttaatacatcatcgagagcgtcgcgttgcaccgccttggccagcaaccccgacagatgcccgcgggtatcgttgagcgcctggccgacgctaaacgctgcctggctcaggtccggtcgcacctgggcgccatggctgctgttgaccagcacttccaacggcacgcccagttcactgcaatagtcgaggatcgtgcggtgctggctgggaatgcgcgccggcccggcgttgaaatactggccagggtcaaaccccaccgtctgcgagcgaccgtccttatagtccacgcggtcgccgttacgcagagtccaggtgcggccacccacgcgctcgcgggcctccagcacctgcacgctgaagcccgcgcgcgtcaactccagcgcagtgaccaacccagcaatcccggcgcccagcaccagtacacgggtgccctgccccaggccgcccttgagtttcagtggttgcggtcgacggtgtgacgatgggcccaggcccaacactgccagtgcatccttgaccgctttctcaccgcccaccgctgcgatactcgacagcgcttcacgtcgtgtcagtcccatgtctgtgcctccttaatccgccagcccaggcgggttgatcagcgactggtcgacccgttccacatccaggccccaacgttgcagcacctgcgcatattgccccccggcaatcgcaccttgcagggcagtgtgaatcggtttgaccaggccgttgtccttgcgcgtggtcaccgcgatatccgcctgcaacggccagccaccgttgacggtgccgacgcgcttgatgccgccggtgatcgccgccgaataggcgtacaccgagttcggcccgaacagtgcgtcactgcgccccgactgcaccgccagttgtgcggcggcctggtcgtcgaagtactgcaacaacgcaggtttgaggccggctttctcatttgcctcgttccaggccagcaggactttttcctggttggtgccggagccgacaatgatcttcagcccggcaatgtccgccgcctgcttgatctcgttgatcttgctggtgctcttgacgtaaaacccgagcacatcctggcggtaagtggcgaagtcgaagcgctttttgcgcgcctcggtcacggtgacgttgctgatcaccgcgtcgtatttgcccgagctgacgcccaggggccagtcttcccaactggtttgcaccacgttgagttgcaggccaaggctgtcggccaccaattgggcggtgtcggcctcgctgccgatggtggtcttgtcgtcactggccagcagtgccagcggtggcccggctacgcctgacacggccacggtgaacttgcccggctgggcgaacttgaagcctggcgggatctgcgcgatggccgcgtcattgcgtggcgcatggatgcgcgggcggtcggggctgaggtccaccggttgcacggcgaatgcgctgtgggccgtggccccggcaattgccaacagggcgacacgggcagtagtgataaacatgggcagtcactccttgaactaaagcactttgccgagaaaggcctgggtgcggggatgtcggggttggcgaaaaatctgttcaggcgggccttcttcgatcagttgaccgtcgcagaggaacaccacgtggtcggccacttcgcgggcaaagccgatctcatgggtgacgatcaccagggtcacgcccagttgggtcaagcccttgatcacgtccagcacctcgcccaccagttccgggtcgagggctgaggtgggctcgtcgaacagcagcactttggggtcgagcgccaaggcccgggcgatggcgacgcgttgctgttggccgccggagagctggcgcgggtaggcgtcggccttatccgccaggccgaccttggcgagtaattcatcggccttgtcacgggcctccacccggccccagcgcttgtgcgccaggggcgcttcggcgatgttttcccaggcggtgaggtggggaaacaggttgaagttctggaacacgaagcccacgtcgatgcggcgcttgaggatctcgcgttcggtgagttcaaacagcaggtcgcctttgcgccgataaccgacgtattcaccgtcgatggtgatatgcccgctgtcgatcttctccaagtggttgatggtgcgcagcaaggtggacttgcccgagccggacggcccgaggatcaccgtgaccttgccagggtcaatgctcaggtcgatgtgatcgagtacctgctggttgccaaagcgcttgcccacgccctggatttgaatgcgcccggcgcgtgcttcaggcatgggccttctccttgaaccagcggcgcacgcgctgcagcggcgtgggtggcagcacccgcgcggtgccccgggcgaagtggcgctcgacgtagtactgggcgctggtgagcgcggtggtgatgatcaggtaccagaccgtggcgacgatgagcaacgggatcaccgcctgggtgcggttgtagatgacctgcacggtgtagaacagctcgggcaaggccagcacgtagacaatcgaggtgcccttgaccaggccgatgatttcgttgaaccccgacggcaagatcgagcgcagcgcctggggcaaaatgatccggaagatgcgtcgagaggccggcaaccccaaggccgccgccgcttcatgctggccggcatctacaccgatcagcccaccgcgaatgatctccgccgcgtaggccgcctgcatcaggctcaagcccaggacggccacggtaaattggctgagcacatccacggtcgaccactcggcgaacaccaggtcggtgaacggcacgcctagcacgatgtggtcgtacaggtaggcaaagttgtagaggatgatcagcaccagcagggccggcatcgagcggaagaaccagatatagccccaggccaacgccgccagcaacggcgaacccgacagccgcgccagggccagcgcggtgcccagcaggatgctgaacactgtgctcagcagcgtcagcagcaacgtctggcccaagccgcgcagcaccgagggcgagaagaaccactggccgaacaccccccattcccaacgcgggttgctggccagggagtgcacgatggcgagcaacaccagcgcggcgaaaatcgacccggcccagcgccaggggtgtcgggccggcaccacgcgcaacgccttgatgggcgtggccgcacggcgctggcgcagcggttgggcgctgacttcatccagcaggtcgtagggtttggcaacaatgggcatgttcttttcctcgcaggcctcagaaggcgtaagtcagccgggtgtagtaatacccgccggtaaaaccgtagggcgaataggtgccgtagctggcaaccatggtgctgctcggcaccccttgtttcttgggatagaggtcgaacagattcttggcgccgatggcgatgttcaggtctttggtgaggctgtagccaaggtcgaggtcggtgatccagcgggcgttgtagacccggtccagatcacgattggccgatgagttcacttccttgtacgagccgtagcgggtcagggccaggttgagattgaagcgctcgatgcgccagtcaccgcccaggatcagcttggtgttgggttgcacgccggtgatcaggttgcgcgcctggcggtccatcaggtcgtaggaggtgccgaggatgtcggtagattccttgtagttgaggattttggtctggttccagttgaacgcggcggtccacttcagcgcgccgaacgcgcccaggtcctggttatagctgctgaccaggtccaggcctttggtgcgagtgtcggctccgttgataaagtactggccgccagaggtggagttgataccgttgttctgcaatacctgggtgacctcagggcccagtaaggtgccggttagggtgatgcggtcacgcaggttgatcacgtaggcatcggcggtgaagctcaggcggtcggtgggtgtgagcgtgaaaccgaggctgaagttggtagaacgctcgggcttgagctcctgcgcgcctagtgcctgggccgccgccgaacccacggggagcacgccatagttgatcgactgatacaccccatcgacgacgccataggtggtggagcgcgcactgaacaggctgttggccagggacggcgcccgaaagccattgctcaccgtggcgcgcaccgcgaactgcggggtgaagtcgtagcgggtggtcagcttgccgctgcgggtagcgcccacgccctcgttgtaatgctcataacgcaccgccgtgccgacgtaccagttaggcaaggggttgaaacccacgtccacataaccggccaggctgttgcgcgaggcgctgctttcttcgtccggtgaaataccattggtgacctgcgccccggacgaagcgcagttacccggcgccacgcagtaaccgccattggcataggacgcgtaatcgccggcttgcacctcgtaggtgtcgcgccgatgctcgaagccgtaggacaggtccaagggcttttgcagaccgatgtcgaagccacgcttgaagtccaagttggtggtcagctcggtggaaatccaggtgccggaggtgaagctgttcggcgtggcttggcccagggaagggttctggttgtgggtggtgccctgctccgcttcgttgcgcccgtaggtggtagacaagtcccagtcccactcgcccacagtgcccttgccaccgaacgccgcctggaagtcgtcctcgtcgatgtaccaggtcggagtgtacccggccgggtaaccattgggcccggtggtgatggtgttggtgatggtcggcaagcggaagttctgcccctgctcggccttgcgtcgcgagtaggtggtaaaggagtagaggctgaggctgtcgtcgatcggcaactcggcgttatagcccagggtcagcaggttggtcttgggcgtgccgtagccgccataggtggacttgcccgccaggccataggcttgctcataggtgtagccgttggcgctggccttgttgtcatcgttctggctgcgcgcatccagggccagttgcacgatgccgccattgccgatttcgaagcccttgttgaggctttgctgcacggtctgtttcttgccgtcgtagccaaggccggcgttggtcaccgaggtaccgcgggtgtcggccttgaggatcacgttgatcacccctgcgatggcgtcagacccgtattgggcagccgccccatcgcgcagcacttcgacatggtcgatggcgctgatggggatcaggtccagatcagccggcgccgcgccggtgttgatgccgttgatattcagggtagcgctggtgtggcggcgcttgccgttgaccagcaccaacacttcggcggcgctcaagccccgcaggttcggtgcccgggcaatgccgctggcgtcccaaccggttttttccggcagggtcagcgacggaatcaccgcgctcaacgcctccatcaacccgggcttgccggtgttttgcaattgctgggcgctgaccacgtcaatcggcaccgggctgctagtaaccgtgcgctgctcggcgccacggttgccggtcacaacgaccgtagacaaagtgctgtcttcctgggcctgcgaagctgcggcgaacagcgacagggtcagggcagcagtaggttgcagaatgtgcttcatatccattcccagctttttccaaatcgcaaagtcgggcagacacgcgcctggcgcggtgtggccggtaatcaaaggggcgatgcggcttgggctaggtgtggggcaagcgagggggttgaagtggcaacatacgttgagctcccgtccaacgactctgcggcggcgggaggattacccggtcaggcgcgcagaatctgaatcacgctgggtaccatccgaggtcaggggtaggctgttgggatcaaacataacggaatggattttaaaaatataatgctatttgggcataagctaatattctctactttcattatttgtaaaaataattattcataaaaatgatttttaatctaagcgtgcagaacgctcaaaatgtgggaggggcgtgctcccgatgacagtgagccagccaaaatgcatttaccgacacgcccccatcgcaacggtaactaccgacggtaaccacgatgcgaagcgagccgctcttgatcttgatctgcttttgannnnnnnnnnnnnnnnnnnnnnnnnnnnnnnnnnnnnnnncgctcttgatcttgatctgcttttgatcttaggcgccccgttaaaccacgctggccgaacgcaggcttgaattcgtgggtaacccggcaggacgccgggttagccgccccgcgccatggatggcgcgtggcggcggcacacggattcaagactgtgttcgggcacaccgagcctaggcgaggtgccgagtggtggggcaagagcgttttgcttactttgccgcttttgcaaagtgagccgccgtcagggcggaaccctaagtagccgttaccgcaggaatggatatgtacccggtataactgcgtcgcctgttaggccgccttcgcgagcaagcccacagtttgattgcggagtgtcaggtagataggcgtcggctggcaggccgtcatcgcaggcaagccagctcccacatttttgattccggggtgtcaggttgataggtgccggctggcaggccgtcatcgcaggcaagccagctcccacatttttgatcgcggggtgtcaggccaccatcgagagcgcccccccctcccacatcggtactcggtgcagccaggctcattgagccggtcgcaacaactgcatctgctggcgataatcatccgtcacctgccgcgcctgactgctgctggtaatcaccctcggcgtaatcagcacaatcagctccgtgcggtccttggacctgccggtattgccaaacaaccagcgcaaccccggaatcttccccaggtaaggcacggcgctgacactctcagcgttgtcctgcttgatcaacccgcccagcaacaccgtctggccactctgcaccgctacctgggtggacaccgagcgtgtggagatgcgcgggttcaccggcgtctcactgttacctgtcgggttctgggcatcactgacctgttgctggatatccatgtacaccagcccacccggattgatgcgcggtaccacatccagaatcacccccgtctgcacatattcgacactgctcaaggtggtgtcggcgtctccggtattaacggtggtctggctgatgggaatgttgtcccccacctggatctgcgccggctggttgttcatcaccaccagcgatggcgccgacagcacctgggtgcggccgttggtttccagggcgtgcaaggccacttgcaggttggagctgacgaaggaatagaacaacgagtccgccgcccccagccctgccccgccaccgcccaaggcgccttggctgccggaggcgttggccaccgtggtgctggtggaattgccggccaggcggcccaggtaccactgaacgcccaggtccagttcgccggtgagcttgacctccaggatgcgggtctcgatctgcacttgcagcggtgggttgtcgaggcgtttgatcgccgcttcgatctctttccactgcgccgggcgggtgcgtaccagcagttggttgctgctcttttgcgcggtgatgcgcgtgcccgcttcgaggtcgctggtgggcggcgcctgggtgctttcggcaggctcggattcaggttcttcggctgcgggcaccggggcgttggcctgcaaaccggcgctggtggacgaggacaaggtggtggtacgcaaccccggcgctaccttcgccggggcgtcatccttgatcgcgccattgccgtagatttgccgcaggtactttgcgaggtcggcggccttcatattgcgcacgtcgtacacatacatctgcggctcgttgccgccgccctcgtcgatggtgcggatccagtcgcccacttcgctgaggtactggggctgcgaagaaatcgccaccaccgagttggtgcgctccaccggcaagaaccgcagcatgccggccaggggtgtgccactgtccgtgccgaacatggcttgcagctcgggcatcagctcggctaccgaggcgcgttgcaggccaaacaccgccaccgacatacccttgagccagtccacatcgaaggtgtcgatcgtgtcctggtagttggccagttcttcaggcgtgccggccaggctcagcacattgcgcgccgggtccaccaacaaaaaagcgttttcacgggcgaagggcttgagcagtttctgcatctcggtggccgagatatagcgcagtgaaaacagacgtgccgagaggccgctggccggttgcgccacgcgcatctgcggcaccagcttgcccgccactgcttggttggccggcaggatcacatagcggttgccctgtttgatcatggcgttgtcggtccaggacagcagggtttcgagaatcgacagcgcttgctgtttgtccacgggtttggaggtggagaagctgacagtgcccttcacgccctcggcgatgctgtagttctcgtgcagcaagtcgcccatcacgctgttgatcacggcctcgatgggctggccggcgaagttgaacacgatgtcgccgccctgctccggcacgtttacaggcgccttgggctggcgcacaaatgcttgattgccgcgaatcaactggcgctgtggcggggcctgggtggcaggtggagggctttgagccacaggcgtctgaagcggcaggcgttgtgcgcccgtgccctgcagggcctcgtgcagcaggtcgtcgtccgggtcgagggtgtcgggcaaagagccacagccgcccagggagacggcggtagccaggcaaaacagcgaagtgcgcatatcgatcaagggagagactcgcggggatgtgagatcaggggtagccgcttaccgtagaggctcagggtttgggtgcgcccgcccagggcaaaacgggcgtattgcggggtcaggtgttccaggcgccaaccgttgggcaacgcttggcccaagcgcaccgtgagcgttgggccaccggcttgcttgagcatggccatttgcaggttgccggtgatcatgatgccgctgagggtcaggttggccaggctcgccacctgggttttacccacctcccggtccgggcggcgatccgggctgaacagtggcgcttgccaggtgctggcaaggtcttgcaacgccggcgtgggagcggcctgcacctggaacgagggcggcgcatgcaccggtgcatcgggtaaccaccggggggcatcgccgatgctgctgaggatcatcgccatcaacagccccaaaagcgcggccacgccgagccagccccattccagaggacgcaatgggccgatcatggtgccacccgcgccggttgcaggtagccgcgcaccagcagttgcaccgccagcttgcctgccccgccattggccggcgcctgtttgtcgcgacgaatatgcagctcatcgacgaacagaaaaggcggctgatattccagcccatgcaggatcgcggtcagcggttcgatggcgcaattgagcgtgaggctgaccttgacctgacgatagggctcgctgtcgtcctgttcaggcgtgatcggcttgcgctgggtcaggttgcagccgccgccgaggttggcgtggctgttgatcaggtcggccagacgctgcatcaggtcggcggcgaccacgtccgggtcgtcgcccggcaacaggctggcgctgctggccgggtcttgctgtgcctgcgccagctgttcgcgcaaggcatcgccctggcgtatgacgctggcatagcgctgctgctgttcacgcaactgttcggcctgctcacccatggcccgcagcggcccggcgaaccagctgtcgatcaacagccaataggccgcgccgagcaccaacgccagggtcaacaaggcggcgccgcggcgttcacggggtgtgcggggtcggcgcatcggcggcctcctggcgtaagtgggcacgcaaggcaaactggtctttgccggtgcgtgcgtcgggttggatcaccccttcgaattgtgcgttgtccaagcgctggcagcctttgatgcggctgatcaggccactggccttggcgctctggccggaaaaactcacttcgccgtccttgacgtccaattggtcgagccaggtatcggcgggcaggcaactggtcaagtcatttagcagcgcagccaggggtggttgcgcccgtttgcgctgggacaggtactgtgccgcaccacgggtattgagcagttgctggcgcagggcgtgcacctgggcgacctcagctttttgctgttggacagtggcgcgcatggtgtcgagtacccgctggcggtcgttgagccacaacagcatcgccgcgatcagcaaagcgccgcacaaccacggcaggctgcgctgcaattgcttgccggcaggacgcgaacgcgggcgcaacggcgccggcagcagatcaatgcctaagcccgccacatccacgcggtgcgggtacaggccgagggcggcgcagtcggtgagaatctggtccaggcgctcgcgcaggatcgccaccaccctcacctccaggtggctgggtgtgcgccgctcctgacgggcgacgaagtagagctgctcggcgtcaaacggggtgtagcggtccagttcatagccaaccacttccatgaggttgcgtgcagcggccagaggcagttgcacgctttgctgcaacacggcgtcgggggcaagcatcagcacctggcgcgcattgcctggcaccaccggcgccgtcagcggccagtggtgaacctgctcaggcggctcctggaacgccagccacttcggcacacagccgcgtaactccgtgagccacaagcgccagccttgttgcagcaggctggcgcgccaatagcgggcaatcggttcgagttgaatcattcttgccaccgcaccacccggtagggctgtgcgctgtcctccgcagggcttaataaaagggtcagtcgcaagcgtgcctgatagccgccggggcgctcggcgcggctgtcgatttccacgacctggccggggtcgacgccctcggcgttctgacttggcaggttcaacgccttgcgcatcagggggctggcgaatgccggagcgggccggtcgaggtcgctccacaaggtgatgtgcggcagtagttggctgtagagcgcctgggtcatgccggggagttgacgcacttgctccagcacccgaaacggcgccaggccctgctggcgccgcgtctcaagggccttggccaactgccgggcctgaaccggtgtagcgccgcaggccagggccagacgtgtgaggtcttggggggcggcgttgaccaggtacagcttgccgcgctcactgcgcacactgacctgcaagcgggcgtcgtcgaaggtcagcgcaatagaacgcccgtccgccacccactgcccttgcgccatgacctgtgcgataccggcctgggcggctaacagcgtctgggtgtgctggcgcagccacagcgcctggcgactttgcagttgcacccacccggccaggccacccagcaatacgctaagcaaggccagcacccacagcaccagcaacagcgcagcaccgcgttggcgcctcattcttcaccgctcgcgctggacaggttcaggcgcagcgcaaccacctgggtgacccacggcaccggcccgtcgacggtggcgtcgatgcgcaccgctgtgggcaagcgccggggccagggccacgggctcaaccagtccgtgggctggcccagtggcgagacaccgcgataactgaactgcaacgcctcgacgttatgcaaaagtacctgcggctcatcgcgctgcgcgttggcctgcgatgccctctgagaaaaagccacctgcagatcctgcccgacccgttgcagggtaaagcgctggatacccccgcccaatacaccgggcaaggtcgccacaaactgcagccgttccggcatgccgatcaagaaaccctcggcctggctgccgtcgtcagtgagcttcagcggcagcgcctcgctgatcgaggtgcgcaaaaactgttgggcggcgcgcatttcatccaggctggcggtgtaggcctgggccttggccaccgcccgattggcccccagcaacgctgcgctcaccagcagcaacaataccgacagcaagctgagcaccacgagcacttccagcaacgtgaagccctgctcacggcgcttcacaggcgcgccttcaaagtgctgaagcgcgcctgatgcacgccttcacgcacgttcaggtcgagacgaaacaggtgcggctgttggcgggtgctggtcaattgccaatgaatgccgtcgagttggccttggcgggttccttcaatcagcgggccggcagcttcctggtccagcagcgtaagcgcggcatgggtgaggcggtcgctgtgggccacctgggacaaggaacgcgcgctctggccgaaggcaactagcaacacactgctgcacaccgccatcaacgtcagggcggcgagcatttccagcaaggtgaaaccggcctgatgcttcatggcagcgccttggattgcacactgccggtgagccagccaatgtcgatgcgccaacgacggctaccgttggccagcagcaggttaccgccggtggaactgccgtcgggatagaacaccacggcggccccggcctgttcggcactgtgcaaggtcacttgcacctgcgctggccactgctgagacgcacgccctggcgcgtggaacgtgcggccctgaaggtcgaattgagtgtgcgccgcctcgccgctgacgatcgcgctcgcacgcgtggcgcgcagggcctcgaccatctgcgcgaccacccgccgctccttggccacctgcaacccttgtcgtacacccagccccaacaacccggcagcgatgccgatcaatagaatgaccaccagcatctccagcagggtaaagcctcgctgggccacgggcgggttattcccagttgcccaggtcggcactgtagccctcgccgccgggttggccgtcctggccgtagaagatcaggtcgaaggcgccgtgctcaccggggaagcgatagccaaacccgtggccgaacgggtctttcagctccgaaggcttggcgtaggggccggcccagttggaagcactggccggcttgtcgagtaactgttgcaggttgttgggcggcgcccccacgtccagggcgtagctgtcgatcttcatgctcaaactggccagttgcgccttgcccgcgccgtacttgcccttgtccacattgccaccgacctggcgcaccacaatggtcgcgactatgcccagcagcacgatcaccgccagcatttccaacagggtaaagccgccttggcggtgtcggtttttcatcggttctgctccttgaaagttcatatatgactggtgaggctcatcagcggcagcatgatcgcgagcatgatcaccgccaccagcaccgccatgaccacggtcagggtcggcaccattgccgcgagcaagcgttcgatggcgcgcttggcctcgacgtcgaagatgtcggcgaccttgagcagcatgctgtccagttcgccggcctgttcaccgacttcaatcatgtgcagcgccagctccggtaacagcggctggcggccgaacgcatcggccagggtgccgccgcccttgacccgttgcgcggccagcgccacttgcgcctggagcgcacggttgctgcagacttgccgggcgatcaccagcgccggcagcagcgccacgccattgcagagcaacgtgccgagggtgcgggccaggcgggcggcttgcacccgttgcaacagcgggccgatcacgcggatgcccagcaggtgacggtcgtaacgctcacggcgcagggggtcgcgcaggcgcgctgccaggacccatccactgatcgacaacccggccagcaccaccaggccataggcgccgaggaactcgccgagcgccaggatcacctgggtgatcagtggaatcggtacacccaggtcctggaaaatcggcacgaattgcggcaccacataggccagcaacagcgccagggaacccagtacgcccaccaccaggaaggccgggtagatcagcgcattgatcacctcgccgcgcagcaactggctgcgctccaggtagtcgctgagctggcgcagggtgccttccagcgccccgccggcttcaccggcgcgcaccatgctcaggtacagcggggaaaacgtaccgccctcctcctccagcgccgccgacagcggtttgccggccttgacctgatcgcgaatgcgctcgatcaaggcccgcacctggggatggcgggcttgcttgagcaacaggtttaaagcgcgttcgaggggctggccggcacccagtagcgtggccaattgctgggtaaaactcaccagcgctgcgcccttcaactgcccgcgtgcctggcgcaacaaggggccgctggccgtttcgatgtgcagcagcaaccagcctcgctgatgcaagacggcgacggcagcggcctggtcaatagcttgcagcgtgccgctttgggccacgccctggctgtccaacgcacggaacttgaacaggctcacgcgtcgtcaccacgggtgacgcgcagcacttcttccagggacgtgacaccggccagggcctggcgcaaaccgtcttcatacaaggtgcgcaaaccggcgcggcgggcggcgtgttcgaggctggcggcgtcggcgcggcccatcagcaggccacgcaactcatcgttcattaccaacaactcagtgagggcgctgcggccgtgataatcgccgcggtaaagcaggatgggacgctgctcggtcaggcgatccaggccgtgctcctggatcaattgcgctggggcctggaaggccacgcgcgtggcagagtccaggcggcgcaccaggcgctgggcgaggataccgctgaccgtggaggcaatcaggtagctttccacgcccatgtccagcaagcgcgtgatgctcgccgcggcgctgttggtgtgcagggttgagagcaccaagtgacccgtgagggaggactgcacggcgatacggcaggtttccaggtcgcggatttcaccgatcatgatcacgtccgggtcctggcgcacgatggcgcgcagcgctccggcaaagtccaggccgatggccggcttgacctggatctggttgatgccttcaagctggtattccaccgggtcttccacggtgatgatcttgcgttcagccgtgttgagctgcgacaacgcggtatagagcgtggtggttttgcccgagcccgtaggcccggtgaccaacaggatgccgtggggccgcgccaacaggtccaaaaaggccgccaggcgtgggccatcaaagcccaggctggggaagtcgaactgcacggtttgccggtccaacaggcgcatcaccaccgactcgccaaagctggtgggcaccgtggacacccgcaggtccaacgccttgccctgaatgcgcagcatgatgcgcccgtcctgaggcaggcgccgttcggcaatgtccaggcgcgccatgatcttcacccgcgagatcaccgccgccgacgaactggccggcggcgcttcggcgtcgtgtaacacaccgtcgatgcggtagcgcaccttgagttggttttcgaagggttcgatatggatatccgaagcgcgctgttccaccgcgcgctgcaggatcagattgaccaggcgaatcactggcgcttcggaggccatgtccttgaggtgttcgatgtcttccagcacgccgccctgctcatcgaggttttcgatcaggctgcccatggcggaacggccctggccgtaatagcgctcgatcagcgtgtcgacttcattacgcgaaccgatggccagccacaccggcacctgacaggcataggccagggcctggaacggataccactgcgccgggttggcggccatcacgcgcaacccgctctgatgccagcccatgggtacgacttggtagtgacgcatgaagcgttcagtcaagacgggtaaggggtcgagcaacggcggcgcagcctcggccaacagcaagggggcgcccagcaaatcggcccaggcgcgagccagttcgacttcggacaccaaacccaggcgcgtgagcaaaccgagcaggtcgccaggctcagtggataaacgctgggcgcgctccagatcgacgtttttgagcccggcgtgctgcatcagccacacgcacacctggtcggtgtgcgggatctgcatcttgcaagcatcgatgggcgctgacggcatcattgaggaatatctaacgttgcgaaaagtatggctatttagaactaccgaacaatgccattagttcgccatagcccaggcaggcgttagccgggtgtatcgactggaagttatagccctagttccggatgagggggtaattaaatacaaaacattgccaaatgcactgatttagagcattggcagccaatagccactagttgcaattagccatattgaatggttgttcaggtgctctctcgttcaattaactgacagtgcaaaagattcaagcgcttaacttcctcatcggtggctaatacgcccagactttgcaggacgcgtgtggcagcgagtacaccgatctccaacgcggggggccggagggtgctgaggctgggcagcaacatgtgtgcaaacgggtagtcgccaaaacccaatacggcgcagtcctgggggatgctcagcccggcgcgttgaccggccagcaaaccgcccgcggcgaggttgtcattggcgaagaaaatcgcgtcgggcgtgatggcctgccccatcagcgcttccatggcctgcttgccggcttcgaagggcgcacggtcggcgtccggcacaaagacccacgggtgcacacccaactcggagagggtcgcggtaaatccatcgcgccgctccaatgcgctgaggtcgcccactgcactgttttgtacgaaggcgatgcgtcgatagcctttgccatgcaagtagcgcgcggcggtgacgcccacttcataatgagaaaaccccacttgcaacggcgcgcgttccggcacgtagtcccaggtttcgacgatcggtatatctgcctcggcgatcatcttctcggtgccagggctgtgaaagcggctggtcagcaccagcgctgccggcgaccaaccgagaaaagcgcgcaccgcgctttcctcctgctcgacgctgaaatagctggaggccagcaacagttggtagccgtgacgattgagggtgtcgctgaagccctgcagcgtattggcaaaaatcggccccgagatattcggagtcaccatcgcaacgattttgccgcgcgcggaggccaacccgccggccaccaggttcggcacataccccaactgcgcgactacctgggcgatacgttcacggcgctcgggtgacacctgttcaggttggttgaagtaacgcgacaccgtaatggccgacaccccggcctggcgcgccacggtattgagggtgacgcggccggcgccccggcgcttgcgcggtttttgttcgttcacggcaaaaacctcaaaaaggaatataaaactaattttttagtatttgacgctctaaaccgacgccttcaataataccgatgttagcgctaacaaagcgcactgtctgctactcgctcgagcgaatgcccaagacattttcaggcgctgaaggtcgcagaaccgcagcggaccagggtattttttcgagcgggcacagcatgcataactttccacggcacacccatttgttgcttctggctggcctcagcgccttgcccgtctgcggcgctgtagcggctgacgaacaggaacccacgctccaatccgtgacagtcaccgctacccgccgcgaagaatcgctgcaaaaagtgccggtggccgtctcggtgctcgatggcgagcaactggagcgtgacaatcgcaacggggtggcgagcatcgcgcagcaagtaccgtcgctgaactttcgcaccggcgcttcgaacaaggacacctcattgttcgtgcgcggcgtgggcaccatttcaacctcgccgggcgttgagccaacggtggctacggtgatcgatggcgtggtctatgcacgccccggccaggccacactcgacctgttggatttggagcgcatcgaagtgctgcgtggcccgcaaggcacgctgttcggcaagaacgcgtcggccggtgtgctgaatatcaccagtaaggcgccgactgcccagacccacggttttatcgaccagtcgttctacagcggccatgaaagccgcacgcgctttggcatcggtggcagcctggtgccggaggtgctcaagggctcgatcagtactttgttcggcagctacgacggtaacgtcgacaaccgccacaacggccaggaggtcaacggttacaaccacaagggcattcgcggcaagctggaattcacgcccaacgatgacgtgacactgaccctgatcgccgactacatgcaatcccacgacgacgcgcccaatggcgtggtcagcaagtccctcagcccggcgttcagcaatgccttgagacaggtgcgcgcctcgagtgacaaccgcgatatcaacaccgatacccgcagccatgtggaagacaccaacaagggcttgtcggcgcagttggactggaacctgggcgactacaccctcacctcgatcaccgcctggcgtggctgggacaacactcaatatcaggatggcgaccgtctcggcacggtcactgccgcgttccccggcaccgccgacaaaggcgagctggcgttcgaccagtattcccaggagctgcgcctggcctcgcccaaaggtgagttcatggagtacgtcggcggcctgttctacatgcatggcaaggatgaagaaacctaccagcgcaccctcaccaccacgacgcgtatcgaccgtggcattgccgactacaacaccaccagcgacagctacgcggcgttcggcgagaccacgctcaacttcacctcgcgctttcgcggcatcgccggtttgcgttacacccatgacgacttgaagtacgaccatcgccgcgtgtccacctctgccactgccgtcagcggcattcaaccggcgacgtcgagttctggttcggtagacgaggacggttggtccgggcggctgggcgtgcagtacgacatcagcgacaccgtgaccagctacctcacctactcgcgcggctacaaaggcccggcctataacgtgttcttcaacatgcagccgcgcgacaccgacgcgctcaagccggagacttccaatacctgggaagccggaatcaaggccactgcctggaacaaccgcctgaccaccaacctggcggtgttccacagtgactacgacaactaccaggccaactttttcgacaccgtcgccggccaagtcgtgacacgcctgatcaacgctggcagcgtcagcaccgaaggcgtcgagctcgattacgcgttgcaagccacccagcaactcaagctctccggcgccctggcctatacccgggcgcgcatcgatcagttcgcgtgcccgccaggcgcagcggcaacctgcaacgtcaatggcaagccactgccgttcagcccggactggaaaagctacgtgcgcgccgactacagcatccccctggagaacggcctggatatcgaactgggcactgactacagctggcagagcgaagtgcagtacgacatcagccagaacctcgacaccaaacaaggcgcctacggcctctggaacgccagcgtggccctggccgactataccaatggctggcgcgtggcgctgttggcgaagaacctcgctgacaaatcctactcaccgctgctggccagcggcggcaactacatctaccgcgccgtgcctcgtgacgatgagcgttacttcggcgtgcaactgcgcaaggatttctagcatgggccgtcaactcaaactcggcgccttcctgatggctaccgggcaccacgtggccgcctggcgccaccccgacgtaccggcgaacgctggcctggatttcgcccactacaagcatttggcacgggtggcggaagcggcgaaattcgacgcactgttcgtggccgacagcatcgccgccgccaccggtgaggtcgccagccaaatggcgcgttcggatcatttcgagccgctcaccctgctctcggccctcagtgccgtgaccgaacatatcggcctgatcgccaccgctaccaccagctataacgagccgtaccacgtggcgcgtaaattcgcctcgctggatcacctctccggcggtcgcgcaggctggaacctggtgacctcggataacgcggccgaggcgctgaatttcggtcgcgacgagcacctggggcatgccgaacgctacagccgcgcacgggaatttcatcaggtagtgacggggctgtgggacagctgggaccacgacgccttcgtgcgcgacaaggccagcgggcgctattacgagccaagtaaacgccatgtgctggaccatgtgggcgaacacttccaggtcaaaggccccctgaacgtggcgcgctcgccgcagggccagccggtgatcgtgcaggccggctcctcggaaaccggccgtgaactggccgcgcagaccgccgaagtggtgtttaccgcgcagacctcattggccgacgcgcaggccttctatagcgacctcaaaggtcgcctgggccaatacgggcgcgaggccgacgcgctgaaaatcatgccgggcgtgtttgtggtggtggggcaaaccgaagccttggcccaggccaaattcgaagcgttccaggcgttggtcgaacccgaggtgggtgtggcgttgctggggcgcatgctgggtaatttcgacctgtccggctacccgctggacgggccgctgcccgagctgcccttgaccgacagcggacagcgcagccgccagcaactgctgagtgaactggcccagcgcgaacagctgacactggcgcaactgggccgacgcattgccggtggacgcggccattacagcgtgatcggcacgccggtgcagatcgccgatggactgcagcgctggttcgaaaaggatgcagcggatggcttcaatattctggtaccgcacctgccgggcgggctggaagattttgcccgcctggtcgttcccgagttacagcggcgtggcttgtttcggcgcgaatacaccggcaccacactgcgcgaaaacctaggcctgacgcgcccggccaaccgttacaaggcggctcgatcatgaagaacacggcccgcgcgccgagcaaaggtggcctgagcgattactgttttgtcgccaacacgaaccggtgcacgagcccaccaaacacgccaccgagcaaaggcaccacccagaacacccacaactgagccatcgcccaatcgccttgaaacagtgccacgcccgtactacgcgccgggttaaccgatgtattgctcaccggaatgctgatcaggtgaatcaagaccagggcgaacccgatggccagcggcgcaaaaccggccggcgcctttttatcggtaacacccaggataatcagcaggaaaaacgccgtgagtacaaactcggtgaccaccactgacagaaacgagaagccacctggagagtgctcaccataaccattggtggcaaaccccgccgacacatcaaacccggccttgccgctggcgatcaggtacagcaccccggcagctgcaatcgcgcccaggacctgagtgaggatgtagggcgccacgtccttgccgtcaatccgcccggcggcgagcaaacccagggtgaccgcgggattgaaatgcccgccggaaatatggccgacggcgtaggccatggttaatacggttaagccaaatgccaaggccacgccgacaaagccgatgcccagctcagggaaggcggcagccagaacggcactgccgcaaccgcccagtaccagccagaatgtgccgaagaactcggcggctagacgttttgtcatcaggtaactccttgaagttaggtcaaagagtgggagcctaacaacggggtaccggcgttggatgtgggaaatttccttggtgtgtggtgattatgaaaaatggcgacggatgctgggaagggcatttattccctgaaaaagcacaaccgtcaccgattgggctaattcattgaataatatggtcgggacggagtgactcgaacacccgccccctggcgccccatgcaagcggacacctctgttggtctcggtcgtcgactgggcgatttcaacggaaaaggccgcgctgagagtagagttgatgccgatctgcacgcccatccgtatgaacccggagccgaaagctgccccgtccggtaaaggctatggattacctcccagtcgggttgccttgaggcgaaacaaatagcccggcgctgggccgggctatcgtcattgctacctgctaagccagcaggtctgcgtcccgctcccgccacagagcttccagcttcgtcagccccatcccggtaatcagcgtcgagcatgttgggatcatggttcaccccgcgctcagccaaccaatgccgggcgccattggtcgactttttcaaccacgccgcagccaagggcctgtgcccggacaacccagcggccagcaccatcaaacgagtcgggaagaagcagcgcaagcggcacaccgttgagggcctgaaggctatcagggaaaaagtcgcctgcctggctacagaacgccaatcggcctggcgcttatcaccgctcagcggcggaccgacatcctagacatgcgtttcgaggggcagaagatctgcgggtcatgcgagcgagggcatgaccaaaaaataccagcgagaccatgaggaaatcatctggtccgaggcagttccggacctgaatatctgcgaaatcactgggtagttttgtgcaggttttgcgcaggcacaaaaaagccgattcatcttatcggcttaagtgactgattttactcaggaataaatggtcgggacggagtgattcgaacactcgacccctagcaccccatgctagtgcgctaccggactgcgctacgccccgactaggcgtgttactgggttcatttcttaacgaagcgaaccggaatataccgcaagcttttgaaatgtggaagtatttttaaagcttgaatcattttttcagcaccaccaatacatcttccaattcggagatcatctggcggatcagttgcttgtattgggtggtgtcgtctttggcttcatcaccggacatacgctggcgtgcgccgctgatggtgaacccctggtcgtacagcagcgcgcggatctgtcggatcatcagcacgtcctggcgctgataataccgacggttcccggtgcgtttgacggggttgagttgaggaaactcctgctcccaatagcgcagcacgtgcggttttaccgcacacagctcgctgacttcaccaatggtgaagtagcgtttgcctgggatgacgggtagctcgtcgttatgacttggttccagcataagcctcaactcgggccttcaacttctgccctggacgaaaggtgaccacacggcgagccgtgatcgggatttcttctcccgtttttggattgcggccaggccgctggcgtttgtctcgcaggtcaaaattgccgaaaccggacaatttgacctgttcgttgtcttccagagcgtgtctgatctcttcaaaaaacagctcgaccaattccttggcctcgcgcttgttcagacccaactcttcgtacagacgttccgccatctcagctttcgtcaaagcccccatacgtcacttccttaacgtggcgttcaacctttgttcgagcgaggtgaggatattttgcgtcgtggtattcacctcatcgtcattaagagtgcgcgatggatgctgccaggtcaagccaactgcgaggctttttctatgcggatcaatgcctttaccctgatagacgtcaaatagcctgaggtctgtcagccattcccctgcattttcacggattacatccagaactgcagtggcagcgacttcacggtcggcaatcagggccaggtcgcggcgcacttcagggaagcgcgacaactcgctgaatttaggcatcttgcccgacgcaacttcagccaagactagctcaaacacgaagactggacggtccagacccagggttttcgacagttccgggtgaatggcgcccacaaaacctaccaggcgaccttcgcgctcgatacgcgcagtctggcctgggtgcaaggctgggtggctgcccggtacaaacgtaaaggcgtccagcgcaccggcaaagcccagcaccgcttccacgtcagccttgacgtcgaagaagtccacgacctcacggccttgcgcccagccttccggcaggcggctgccgcagacaacacccgccagcattggctcttgcttcaagccatcgagctggccgacgaaacgcaagccgctttcgaacaggcgcacgcggtcttgctggcggttcaggttgtgggaaagtgccttcaccaggcccggccacaacgaggaacgcatggcggccatgtcgttggagatcgggttggccagcagcaacggctctacgccagggttgaacagttcgaactgttttggatcaatgaagctataggtcactgcttcctggtaaccacgggcaaccagcaaacgacgcagttcaggcaggtgcgcacgcgcttcggccttgggttgcggtgccaggcgtgcttgcggatagcgaaccggcaggcggttgtagccgtacaggcgcgccagctcttcgatcaggtcgacttccaggctgatgtcgaagcgatggctaggtactgcaacctgccactgcccttccccacccgcagaaatacccaggccgagcgcagacagcagttgctcgatttcagccggctcgatgaccaggccgagcatttgctcaacgcttttggcacgcaaggtgatcggcgcaatcgacggcaggtactgttcgctgacggtttcggtgatcgggccggcttcgccaccggtgatttccagcagcaggccggtggcgcgctccatggcttcacgggcgagtttccagtccacaccacgctcgtagcggtgcgacgcatcggtgtgcaggccgtaggaacgggccttgccagcgatcgcgatctggtcgaagaacgcactttcaaggaatacatcacgggtggtcgcggatacaccgctgtgctcgccacccatcacgccggcaatcgccagggcgcgtgcgtggtcggcgatcacgagggtatcggcacgcaggctgacttcctgaccatcgagcagcaccagcttctcaccctcttcggccatacgcacgcggatgccgccgttgatttcggcaagatcgaacgcgtgcaacggctggcccagttcaagcatcacgtagttggtgatgtcgacggcggcgtcgatgctgcgcacgtcggcacgacgcaggcgctcgaccatccacagcggggttggcttggacaggtcgacgttacggatcacacgccccaggtaacgcgggcaagcgttgggcgccaatacttcaatcgagcgtacttcgtcgtgtacccccggtacggcagcgaccactggacgggtgacaggcgcgttgtacagcgcacccacttcacgggccaggccagccagggacaggcagtcgccgcggttgggggtcaggtcgacctcgatgctggcgtcttccagctccaggtaaacacggatgtcctgacccactggcgcgtcggccggcagctccatcaagccatcattgccctcacccacttgcagctcagcctgggagcacagcatgccgttggattcaacgccacgcagcttggccttcttgatcttgaagtcgcccggcaactgggcgccgatcatggcgaacgggatcttcaggcccgggcgcacgttaggcgctccgcacacgacctgaaaggtttccgagccgttgctgacctggcacacacgcaatttgtcggcatccgggtgctgctcggtgctcaacacctcgcccaccaccacgccgctgaaaactccggcggccggggtaacgctatcgacctcaaggccggccatcgacagacgcgcaaccagcgcgtcgcgatctacctgcgggcttacccagccacgcagccattgttcactgaatttcatcctgctctcctaaagattcgttacgactagcgaaattgcgcgaggaaccgcaagtcgttgtcgaagaacagacgcaagtcgttcacgccgtaacgcagcatggccagacgctcaacgcccatgccgaaggcaaagcccgagaactcttccgggtcgatcccggacatgcgcagcacgttggggtgaaccatgccgcagcccatcacttccagccagccggtctgcttgcacacacggcagcctttaccgctgcacatcacgcattccatgtcgacttcagcggacggctcggtgaacgggaagaatgaaggacggaaacgcacggccaactctttctcgaagaacacccgcaggaactcttcgatggtgcctttgaggtcggcgaaattgatatcgcgatcaaccagcaggccttcgacctggtggaacatcggcgagtgggtgatatccgagtcgctacggtacacacggcctgggcagacaatgcggatcggcggcttgttcgcttccatggtgcggacctgtaccggcgaggtatgggtgcgcagcagcatgttggcgttgaaataaaaggtgtcgtgcatcgaccgggccgggtgatggcctgggatgttgagcgcctcgaagttgtggtagtcgtcttcgacctcagggccttcggcaatgccgtagccgatgtgggtgaagaactgttcgatacgttccagagtccgggtgatcggatgcagaccgcccgaggcctggccacgaccaggcaaggtcacgtcaatggactcggcggcgagcttggccgcaagatcggcctcctcgagcgacgccttgcgcgcattgagaacctctgtgacacgctccttggcgacgttgatcagcgcaccgacttgcggacgctcttcagcaggcatatttcccagggtcttcatcacctgagtcaattcacctttcttgccaaggtagtgaacccggatttgctccagggcatttacatcttcagcgctttgcacagcctcaagggcttgggcgacgagcgcgtccaggttttccatgtacagactccagatacaaaataggggaagagcttgaaggctcttcccctatttatgacgtttaccaccttgggccacaggagtagcccagggtgactgtcgggggtacttaagccaaggaggctttagctttctcgacaatcgcagcaaacaccgctttttcgttcacggccagttcagccagaaccttacggtcgatttcgatggacgcttttttcaggccagcgatgaaacggctgtaggacagaccgttaacacgtgcaccagcgttgatacgagcgatccacagagcgcggaactgacgttttttctgacgacggtcgcggtaggcgtattggcctgccttgattaccgcttgcttggcaacacggaatacgcgtgaacgcgcgccgtagtagcctttagcaagtttcagaatttttttgtgacgcttacgggccatgacgccacgctttacacgagccatgagttacttcctctattcttgaaccaaaattaacgaaggcgcagcatgcgctcgacttttgccacgtcagacggatgcagcaagctgctaccgcgcagttgacgcttacgcttggtcgacattttggtcaggatgtggctcttgaaagcgtgcttgtgcttgatgccgttagcagttttcagaaaccgcttagcagcaccacttttagttttcatctttggcatgttcggtactccgcattcagttgataaacataatcagaaggcctgccgtgccctgttgattacttcttctttttcggggcgatgaccataataagctggcgtccttccatcttaggatgctgttcgaccgaaccgtactccagcaggtcagcttcaacccgcttgaggagttccatccccagctcctggtgggccatctcacggccgcggaatcgcaaggataccttggccctgtccccatcactcaggaaacgtaccaggttgcgcagttttacctggtaatccccttcctccgtccctggacgaaacttgatttcttttacttgaatctgcttctggttcttcttcgctgcggcaacctgcttcttcttttcgaagatcgatttgccgtagtccatcacccgacaaacaggtgggattgcatcggcggagatttccaccaggtccagcttggactcttctgcaatacgaagcgcttcatcaatcgagacgatgccaatctgctcgccatcagcgccaattaaccgaacctcgcgtgccgagatattctcgttgatcggggctttcggtgcagctcgtttatcttgtctcatttcacgcttaataataattactccgaatctgggcgaccacgccgggaaaccgcttgcgcgaggaactcagcgaactgggcgacgggcatcgagcccaggtcagcaccttcacgagtacgcacagcgacagtctgcatctcgacttcccgatctccgataaccaagagatagggaaccttgagcaaggtatgctcgcggattttaaagccgatcttttcatttctcaagtcggacttggcacgaaacccgctttcgttgagagttttttcaacttcagcggcaaaatctgcctgtttatcagtgatattcatgatcactgcctgggtcggagccagccacgcagggaacgcgccctcgtagtgctcgatcaggataccgacgaaccgttcgaacgagccgaggatcgcccggtgcagcataaccgggtgtttacggctgttgtcttcggagacgtattcggctcccagacggatcggcaggttaaaatcgagctgcagggtaccacactgccagacacggccaaggcaatctttgagcgagaactcgatcttcggaccgtagaaggcgccctcacccggctgcagatcgtacgcaaggcccgcactgtccagcgctgcggccagtgccgcttcggcgcgatcccacagctcgtcggaaccgacgcgcttttccggacgagtggacagcttcatctcgacgtcggtaaagccgaaatcgcgataaacgtccatggtcagcttgataaacgctgcggactcggcctgcatctgctcttcggtgcagaagatgtgggcgtcatcctgggtgaagccgcgcacacgcatgatgccgtgcaacgcacccgatggctcgttacggtggcaggcaccaaactcggccaggcgcatcggcaactcgcggtagctcttcaggccctggttgaagacctgcacgtggcacgggcagttcatcggcttgatggcgtagtcgcggttttccgactgggtggtgaacatgttgtcggcgtagttggcccagtgcccggatttctcccacaggctgcgatcaaccacttgcggggtcttgatctccaggtagccgttttcgcgctgcaccttgcgcatgtactgctcaagcacttggtacagggtccagccattcggatgccagaacaccatgcccggcgcttcttcctgaaggtggaacaggttcaggcgcttgccgatcttgcggtggtcgcgtttttcggcttcttcgatgcgctggatgtaggcggccagctgcttcttgtcagcccaggccgtgccgtagatccgttgcagttgttcgttcttcgcatcaccgcgccagtaggcaccggacagcttggtcagcttgaacgacttgagaaagcgcgtgttcggcacgtgcgggccacggcacatgtcgacatattcttcgtggtagtacaggcccatggcctgctcgtccggcatgtcttccaccagacgcagtttgtagtcctcgccacgcgcggtaaacacgtcgatcacttcggcacgcggggtgactttcttgatgacgtcgtaatctttttcgatcagcgcgtgcatgcgctgctcgatggccgccaagtcgtccggagtaaaaggacgctcataggcgatgtcgtaatagaagccttcttcaatgaccgggccgatcaccatcttggcggttgggtacagttgcttgaccgcatggccaatcaagtgcgcgcaagagtggcgaatgatctccagcccctcttgatccttgggcgtgatgatttgcaggctggcgtcgctggtgatcaggtcgctggcgtcaaccagcttgccgtcgaccttgccggccacggtggccttggccaggcctgcaccaatggatgcggcgacctcggctacggaaaccggatgatcgaatgaacgttgactgccgtcgggaagagtaatagttggcatggcgcctcctctcctagtggtgacccctaccaaaggtcacgtgggttgggatgagccagtacaagatccaacaccaggccgttcaataatgaacgcctgccttacagcggcaggagcctttcggccaaccgataatcgaaccagagtgactggagtgaacaaaaagaacctggcaaggcggcaaatggcgcgccgggaaatagccaggcaaggatgctagcacagatgaacggtcatcgcgtcggccaagcgttgggtaaagagcaattcatggctttatagctgtgaaagtgaacttgagctgtacgtagggcctcaaagccactgagaatcgccgttcgtcctcgacccaaaggagcatccccatgatgcgttttacctctaccctcgctgtcgccgctaccctgagcctcctttccctcggcgcgcaggctgcagccccttccaactggccagccggcgcccgtgacgccttcgtcaacgactgcagtgccgccgccagccagaacgtggacgtcaaaactgccaaagcccactgtgaatgtggcgccgacaagatcaatgccgaattgagcactgccgagatcaaggaattgatgaccaaccagaacgccagcccggagcttaaaaacaaagcggtcgcggctatttcgtcctgcaaagtggtgaagaaaaagtaagattggctgacgattcgacggctatttcgctggaaaaacagcctgaaaactgccatttcgcacaaattatgcaggttttacggctttttttaatagctgatatgtcgtcgcaaagccccgtaaatcggggctttcagcccaatgatggatcaaacgcaaagcgattgattagcaaacagtgccttgggggggctcccaagccgaacatttcgactatgatagcccggtgtgcccagttggcctgagcagcacagcactactgaaaatatatgtttcttggagatacaccatgtctaatcgccaaaccggcaccgttaaatggttcaacgatgaaaaaggcttcggcttcatcactcctacaggtggcggtgacgacttgttcgtacacttcaaagctatcgaaagcgacggtttcaaaagcctgaaagaaggccaaaccgtttccttcgtggctgagaaaggccaaaagggtatgcaagctgcacaggttcgcggcgagtaattctccgctgagctaaaaaaaaccccgtccatgtgacggggttttttatgggtgatgcaaaagccgtatcagccgcagttaacccggttgatcaccaggttgttgtcggtgttcaggttcaagcggtcggagcgatactccagcgtgatcatgtcattgggcttgagaatgcgtgcattctgcgcgccggcacgcgtgcgggcctgttccagcaattgaggcgaggctttctggccgatggcgaactctgcagccttcgactcacagcggctatgaccggcatcggtcgcagtggcagctttgcctggctcagaggcacccggggtgctgcaacccgccaacgcgagcgcagccaacaaagtaccgaatgatgcgagcttccaaggcatgaagcctcctatgataaaaagtggacagagatcgtgcgacagcagtcaaagcgattggtttcaagacgttaaccgcttgtgggcaagtctgcctgactcactgctggcaagcgccctgtcaatcgtgactagatatgaacgcccttagtagatgtcgatatagtctgacgtcgctgtaggccaattctgcttcagtgcgttaaaaatctgcatgacccaaacttcgtcactggccgccacgagaccgacataaccggaacccttggcccaggtctccaggcgaaacagcaggccatcgatatcagcccccccgactacgccggaagaaatgtaggcgacgccttttttggtcacccgcagctgggtatgttcgtcgtcactggcgctgccaagcagttggcgcacagcctccagcgtcaggttgtcgagcttgctcaaatcgatttgcacgcggtgtttcccggccatttaacaggccgacagtgtcgcacagcctctgcgtcatgcctaagtagcagtgccaaacgccgtacaaaatgcttaactgcgcccctctggaacggcgttccagtgcattaccacgcattttcagcccgtgagatttccatgaccaccgtaacgcttcaagccgacatcaaagccaagtggccccaagggcaaagttcctacagccccggaagcccggaagaactggcgatcattggtatcgacctgttggtcaaggaactgggcacccaggcggcgcaagcgttcattggccagatattcgagaaatacccggccgactacatgggcgcccaagagcgcgaatagaaccgggcgacgagcgccgcccggcaaaacaccttacttcagacgtgccaggcgctcggtcagcaaatcgaagaagccctgcgcgtcgccattctcaacccagaacacattcttgggctgctttaggccgtcgtaccaatcgacgatggtctggccgaaggtcgggccttcgcggctgtcgaccaccatgttggcctcacggccgctgaacagcgaaggcttgagcaggtacgccaccacggtagcgtcatggaccgggccacccggaatgccgtagtgctccatatcgcctttgacgtactcattcagaatactgctgaccaccttgctcgcattgttgttcaggtccgcaatctttttcaggcgggcgtcgctggtgaggactttatgggtcacgtccaacggcaggtaggtcaacttcaccccgcttttgagcacgatctcagccgccaccggatcggcgaacaggttgaactcagccacaggggtgatattgccaccattgaagtgcgcgccgcccatcacgaccacttccttgatgccctgggtgatttcgggcgcctgggtcagtgccagtgccaggttggtctgtgggccgagcatggcgatggtgatgctgtgcggcttggcgctgctcagggttttgatcaggtagtcgaccgcattgccttcggccaggccttttttcggttcatgcaccgtgacgcccgaaatgccttccttgccatggatgttctcggcgtagatcggtttgcgcagcagcggcgctggcgcaccggcgtacaccgggatgtcctcgcgccctgcccactcgcgcgccaggcgcgcgttgcgggaagtcttgtccaggcgcacattgccggccacggtggtcagcgcacgaatgctcagttcctgcggcgaagccatggcgaacagcaaggccaccacatcgtcggcacccgggtcggtatcgatgatcaggtcgattttttccgccgcttgggcgcttgcagcagtgagcgcggacaaaagcagaacactccggaacaggtttttcagggtaggtagaccacgttgcataaagcactccttgtcattggggggggacgctagaacgttacgccggacaccagcgcgatattgcagtacggctggcactcgccagtgcgcaccacggcgcgggcattgcggctcaattgcttgaatttgtcatggctgagcagacgtcgttcgcccagttcagcctgctctgtgagcgcatttagcgcggtcagcgcgggcggttgtttcagcaggatctcttctgccagaacatggctttccacctgcatttcgctaagcacgatgcgcaaggtgctgatgaagtccgggatgccttgggtcagggccaggtcgatcagttcgacgccgggaggcaccggcaggccggcatcgccgatgaccaggatgtcgccatggcccagggacgcgatcacgcgcgacagggcgatattcagcaaaggggtctttttcatgcgggcacaaaaccttgtacgtcgtgcagcgtaggaatggaaggctgagcgccggcgcgggtcactgacaacgccgccgccacctggccaaaacggatcgcccgggcttcgctctggcccgcggccagcgcggcggcaaagccaccgacaaaggtatcgccagcagcggtggtatccaccgccttgaccttcggcgccaccaggtgctcaaagctcttgccgtcggcaaacagcgcgccctgggcgcccagggtgatgatgaccttaccggcgcccgctttgatcagcgcggtcgcggcgaccttggcgctgtcgagggagtcgaccgtcacgccgctcagggcgctggcctcgctttcattggggatcagataatcgatcgaggcataccaatcagcgggcaacggcccgcttgccggggccgggttgagaatgaccgtcttgcccagttcgcgcccccgctggagcgcatacccaacggtctccattggcacctcaagctgacagatgatcacatctgccgcctggagcacagcgtcgcacgttcgcagcgacgcaggcgtcagctcaccgttgctgccggccacaatgacgatggcgttctggctgctgtcatcgaccacgatcaacgccacaccgctggagccgtccaccgtgctgacagcctggcaatcgatcccttccaccaacagcgcatcgcgcaattggctgccataggcgtcggtaccgatgcaccccaccatggcgacactcgcccccaggcgtgccgaggcgacggcctggttggcgcccttgccaccgggcacagtggaaaatgtctggccgatcagggtttcaccggcacgcggcaagcgactggcgcgggtgaccagatccatgttcaagctgcctattaccactacttttgctggcatacatcagtactcatcaattcggttcagcggtattgggcgaacacatcagccaatggcgcggtcgactcacgcaaaacaatactgggcgtcacgatacgttgatcgatcggcagttggggtgttgctattcgttgcagtaataattcggctgccgtctcacccaattgcaggatcgactggccgaccgtcgtcagcgccgggtagacgtagcgccccatctgaatgtcatcgaaaccgatgaccgacagctcgcccggcacccgcacattgcgctcggcagcggcgcgcagcacgccaaacccgatcatatcgttgctggcgaaaatcgcgctgggcgggtgttgcgataataactgtacggctgcggcatacccgcccgtgctggtgaaatcgctttccagggtacgactggccaacacctcgatgcccgcctcgcgcaatgcacgctggtaacccgccaggcgcatctgcgccacgcgggtatgccccgggccgccgatacaggcgatgtcccggtgccccaattccagcaagtgccgggtcgccaggtaagcgccctcctcgtgatcgatgcgcactaggtccacatcaatcccatccagcgcccggtcgacaatcaccatgggcgtgcgcactgcactcaagcctgcggcaaggccactgtcatcgccacctacggaggtcacgatcaagccgtcgacgcgcttttccagcaacacgcgcaaataactgcgctgtttctctgcgtcgtcatccgagttgcagaggatcacgcaatagccattacgctcgcagtaatcctcgataccccgagccagctcggcaaaatacgggttgaggctgttgggcaccagcagcccaatggtggccgtggtcttggccttgagcgagcgtgcgacggcactgggcacgtagtccaactgcttgatcgccgcctcgaccttgatgcgtaccggctcgctgactgggcgcgtcttgttcaccacatgggacacggtggtgtaggaaatacctgcaagcgctgccacatccttgatcgttgccatggctcagccccgccgactggcgcgctggctgcggtaagtgtcgaggaccacggcgatcacgatcacagcaccggtaatgatgcgtttagtcggttccgtcgcgccgatctgcgccagcccggcggccaagaccgaaatgatcaacacgccgaagaacgtactgatgaccgagccacgcccgcccatcaggctggtgccaccgatcaccacggcggcgatcacttgcagctccaggcccgaaccggcattcgggtccgccgcttccagacgcgaaatctgaaacaacgccgccacaccggccaacagccccatcaggctgaacaccaggatcttgtaaggcttgggattgatgcccgccaggcgcaccgcttcttcgttggtgccgatgccgatcaggtaacgaccgaagaccgtacgggtcagtaccaactgggccgcgatgatcaccagcaaggcgatgatgaacgacggggaaataccgaaggcaatcgggttggacagccaggcaaacgaatcaccgatataagcggtgcgcgagcccgtcatctggtaggccacgccgcgggccatctccagcacgccgagggatacgataaatgacggaatgcgccaggccaccgtgatggaacctgtgatagtgccggccaacgccgcgcagcccatgcccaacagggcggcgggcaacacgctccagccccagcccaggatcgccacgcttactgccgaggccgccaatgccaataccgatcccacagacaggtcgatgccgccaatgatcaggatgaaggtcatgcccaccgccagcaccatcaggtccggaatctggttggccagggtgctgaaggtgtcataggacaggaagtgatcgctgagcagcgagaacagcgcaatcatcgccagcaacgcacccgccagccccaggtaggtacccaggccatagaagttgccgccagttttaccgggggaaatgcttgttttcatggggtattcctaggcgcggcttcgttgagcagcgcatcacgtttctgatagccggcaaaggcggcggcgagcaattcgtcctgggtccagctgtcacgctcgaaggtctcgatcaggcgcccggcagacaacacgccgatgcggtcacagatcagcatcagctcacgcaggtcactggacaccaccaccagcgctttgccctggcgggtcagttcaccgagcaaggcatagatgtcgaacttggcaccgacgtcgataccgcgggtgggctcatcgaacagcatcaccgcgcaatcgcgctccaaccagcggccaattaccaccttttgctggttaccacccgacagctcggacaccagctgcgtcgggctggaactgcggatacgcatggcgtcgatctggcgcttggccagagcggtttcgttgcggctgttgacgacgccaccgccggaaatttccggcatgttgcccagggcgatgttggcgctgatggactgggtcagcagcaggccctcgcccttgcggtcttcggtgatcagggcaataccatgaccgaccgcgtccaccggcgagcgaatgctcaccaccttggccggcgaacccaaggccacggtgccgctgtcggccgggtcggcgccgaagatcaggcgcagcaattcggtgcggccggcgccaatcaggccggaaatgccatagatttcaccggcgcgcacttcaaaggacacatcacgaaccttgtccgaacgggtcaggcccgtcaccgtcaaggccgggccaccgatggtgcgcgggcccaggtcaatgtgttcgcccagttcgcgaccgaccatcaaggtcaccagttgctcactgttgtagttggccatcggttcgacgcagaccagtttgccgtcgcgcaataccgcaatgcgctgggcgacacgggccaactcttcgagccggtgcgaaatataaatgatcgccacgcctcgagcctgcaggcgcgtgatttgttcgaacagcatctcgacttcacgagcagtaagcatcgccgtgggctcgtcaaggatcagtacatggcagtcgccgatcaggttacgagcgatctcgaccatttgctggtgaccaatgcccaggctgcccaccagcgtgtccgggtcgatcgcgtccaggccgacttgggccatggcttcgatcgcggccttgcgcagctgtttgcggctgatccagccacagcggcttggcaggttatccaggaacagattttcagccacggtcagcgtcggcagcaggttgagttcctgcataaccatgcgcacgcccaaggcttcggcctgggtgcggctggcagggcagtaatcctgaccattgaattgcatgtgccctgtggtgggcgtgaccaggccgccgatgatcttcgacaaggtacttttgcctgcgccgttttcaccggtcagcgccagcacttccccgcgattaagcgtcagggtgatgtcggacagaaccggttgggcataggtcttaccgataccgctgaccgagaggacagcgttcggggcggaagatgacataggaaaatctccaggcgcccgctcaggacgagcgggcgctgttgggtactgccaggattactgcttgatgacgagttcgaccggggtttcgatcacgccatctttggcatcgactttctcacccttgaccagcttcagcgcgttctggataccgaacacggcttgctgggcagcggcctggtcagcggtggccaacacgcggccgtccttgagcattggtttgatcgcgtcaatgttgtcgtaacccaccaccaacaccttgccggccttgcctgccgcacgcacggcggagacggcgcccagggccatgttgtcgttaccggccagcagcgccttgatatctggcgtttcgctcagcatcgctgcggcgatcttgttgccttggtcgatttcccagttaccggattgggtggaaacgatcttcatgcctgccgcgtccatcgcatccttgaaacctgcggtacgctgctgggcattggtggtagtgggtacgccctcgatgatgccgaccttgtcaccggcagccagctgcttggccaggtagtcacccaccagcttggagcctttgcggttatccgggcctacaaacgggatatcgaggtttttgcttttgagtacttccgggtccaggcggttgtcgatgttgaccaccttgataccggcatcggaagctttcttcagcacactggcgagtgccttggagtcggcgggagcgatgacaagcgcatcgaccttggcgttgatcatttcgttgacgatggcgatctgagcgctggtatcggtctcgttcttgatgccgttggagatcaacttgaattctgtaggatgcgctttctggtagtccttcgcaccgtcggtcatggtgacgaaaaactcattggcaagggacttcatcaccaaacccacggtaggcgttttggcagcgtcatcggcaaatgcagaagagagaggcaaagcggcggatgcggcagcaagcacagcaacagcaagaagacgtccagcaaatggcagcttcatgggttcactccgatcttatgattattgtgagcaacgcttgcaccgaagaccccttcggcagccctcccacctgggcggctgatacgagctgtgacgatgtgcctaagggcccagtgaaacatctcgcaaacgtttgcgttgagcaaactatgagaaccttgtcgagatttgtcaacgatggcagcgagcctttcatgggcgccctccaagcttatccttcagctactgacagctgatacgtttaagcaaaatcgccctctgtgaccgttctctgaaacgacaggctgtgtggcgaatgatcacacagggtgcccggacaaatcgtgaacgctttcggacaaccgaacaccacagcccttctcgttcggaaagccggacagcgcccaaccccatcaaaccgaaacctcactttaaattgttttaaatcaataagttaatttaaaaataccaacatgctcagcctggtacaaatcctgctctttctcagcacctcgcggcgttcagaaccgcccgggtgttctagatgaacctgctacagcactcatcaaaaaccagagagaaaaataatgaaatctgcattgaagaacgttattccgggcgccctggcccttctgctgctattccccgtcgccgcccaggcaaaggaagttgaaagcaagaccaaactgtccaacgtggtcatcctcgccaccggcggtaccatcgctggcgccggcgccagtgcggccaacagtgccacctaccaggcagccaaagtcggcatcgaacaactgatcgccggcgttcctgagcttagccagatcgccaatgttcgcggcgaacaagtgatgcaaattgcgtcggaaagcatcaacaacgaaaacctgctgcaactgggtcgccgtgtcgccgaactggccgacaacaaggacgtggatggcatcgtgatcacccacggcaccgacacccttgaagaaaccgcctacttcctgaacctggtagaaaaaaccgacaagcctatcgtggtggtcggctccatgcgcccaggcaccgcgatgtcggcagacggcatgctcaacctgtacaacgcggttgcggtcgcaggtagcaaggaagcccgcggcaaaggcgtgctggtgaccatgaacgacgagatccaatcgggtcgcgacgtcagcaagatgatcaacatcaaaaccgaagccttcaagagcccatggggcccaatgggcatggtcgttgaaggcaaatcctactggttccgcctgccggccaagcgtcacaccatggattctgagttcgacatcaaaaccatcaaaagcctgcctgacgttgaaattgcctacggctacggcaacgtgagcgacaccgcctacaaagcactggcccaagcgggtgccaaagcgatcattcacgccggtaccggcaatggctcggtatcgtccaaggtcgttccagcgctggtggaactgcgtaaacaaggcgtgcagatcattcgctcttcccacgtcaacgccggtggcatggttctgcgtaacgccgaacagccagacgacaaatacgactgggtcgccgcccttgacctgaacccgcagaaagcccgcatcctggccatggtcgccctgacgaagacccaggacagcaaagaattgcaacggatcttctgggagtactgatccctgctgattcacccgtaggagcgagcttgctcgcgaaaaacttgatagcgccgcgttaagtcaggctttacgcgttatcgttaacgttcttcgcgagcaagctcgctcctacagttcctgccttcccttctcaacaaacttcctgattcgctgtcagacgaacttcttgaaatttaagcagttgcgaaattgcctacagttaaatactgtatgtgcgtacagccaattaaggaatgctctgtggcaaagccctcttccgcagcacctgcatcgcctgacgcctatcagcgcctggccattcgcgtgcaaaaaatcatcaattcgaccaacgcgcagaaagccaaggcagcgttgatcttccgtttacccgatgagccggagaacgattggcaacgtttactggaagagattgcggaaaacgacaacgtcaccctcgcctatcgagatgacggtggcgtgcagattttctgggttgtgccgaaggaagattgattcaatgagtgcccgttttattgctgtgtgctgtctgtttttcaccgtcaccgccaacgcccaggcccctcgaaccttcagcgaagccaagaaaatcgcctggaagctctacgcgccgcaatccactgaattctattgcggctgcaaatacaccggtaaccgggtgaacctgaaagcctgcggttacataccgcgtaaaaacgccaaccgcgccgcacgcattgagtgggaacacatcgtgccggcctggcaaatcgggcatctgcgccaatgctggcaaaacggcgggcgaaaaaactgcacgcgccatgatgaggtgttcaagcgcgccgaggcagacctgcacaacctggtgccgagcatcggcgaagtgaatggcgaccgtaacaacttcagctttggctggctgccggtgcaaagcgggcagtacggctcatgcctgacccaggtggacttcaaggcgaagaaggtcatgccgcgcccgtccattcgcggaatgatcgcgcgcacgtatttttatatgagcaagcaatacggcctgcgcctgtctaagcaggaccggcaattgtatgaagcctggaacaagacctatccggtgcaaacctgggagcgccagcgcaaccagaccgtggcgtgcgtgatggggcgtggtaatgagttcgtcggcccggtcaacctgaaggcctgcggctgaacgtgggcggggtgcccgcccacttggcctgctactgcgcgacgttgtgctcgataatctccgacacggtgtcggttttcttggcccgcgccattttttcgttcagcagcgcctgcttggcctcggcctcagctttggtcgcgaacgggcccaatagcacctcatccttgccgtcgactttcacgatgtagaaattgaatccgtgttccagcaaccaggcggtcaggtcggtgatcgcctgcagcttatggtccggcgggccgacccgtatatcccactcctgagcggcaatcgcaccggtttgcggcaggctttcggtcacggcaggcttggccttgggggcgtcgaccgacttaccttcaccgcatccggccaacgccaacaccacaattgccatcgctactttacgcactgccctgctcctttgaggatcaaagaggcaactttaccattcactgtctattctggccgtcataaacgttggcttaaacaatgcgaatcatgtatcgcgacctgtatgataccgccatgggaattaatgtcgcctctatgcgtcctagaaagaggcagtcacagggaagcgcttcgcagtaagctacacacatccgacacctaccctgtctgaaacatgtgtccttaaaagtaattcaaggagaagtccatgcttatactcacccgcaaagtcggtgaaagcataaacatcggtgatgacattacgatcaccatcctgggcgttagcggccagcaagtacgaatcggcatcaacgcccctaaggatgttgccgtgcatcgcgaggagatttaccagcgtatccaggccggcctgactgcacccgataaaaaccagacgccttgaaacgcctccagtagccagccttttcgttcactgtaacggctggcgaaaacccaattggcctgctcgcgtctccccgcgtgaccagcgcgccttgagctttcccttcgctgcaagatgaaactgtcagggtatccggaacttgtcgcgctattggcagcccaatttctgacactttatcctgccatccgagtgcatttcaggaacacgtcgatgaggccagccgcgtcgcaaccccttgtttcaagatcctggatgattgccctgctgatagggctggtcttcgtggcactcgggtgtgggttgagaatggaagttgaaggggccgatcccgacacccattcctgggtggatctggcgcttctgctctgcggctacctgcttgtgttctgcctcaagccgatccagaagatgatcttgcgcaagttgcgccagcgcgccgcccatcgcacccacgagaaagccgcacgctgagcgctgctgcctgctttcggatcgccggtatttacagcgccgccgcaccacctatcattgggcttgcgctgcgtagccaatcaaaggtgcaaatgcggatggacaccctcaacaaatcccaaatcgaaaaagccttggctgaccgcctgcccagctacagggtcgagtgcacgctgcatgccgacggcaccctgtcagccgtgctcagcggcccagagaccgatcacttcgcgattaccggcatcgtgcgtgcgcactatcacggtacagaggccatcaaccagctcgccaccgagatactcagggaaatggtgatgtcgcgccaaggcatgaaaaacagccggttgcaggccctatcagactccctcgactgcctggaaggccgagaccggtaacggacttaaggacagcaagccatcagccccacgctcggctttcaacgcactatattcctcgatgcgagcatgggcagtcaccatcggcgccatgtgtgtcgaggtcaccaccatgatatccgcccccgccgcttccccagcctgaatccccactgtggcgtcctcgaacaccaggcagtcttgcaccggcacgcccaggcgctgggcacccagcacataacaggccggatcgggcttgcccgtctttacatcttcggctgtcaccagtaccgccggcaccggaatgcccgccgcttgcagccggcgcacggccaacgcttttggcgcagaggtgaccaacgcccattgatcgacgggcaggctggccaaaaacgccaccgcgccgggaactgccacgatgccttcgacatcgtccagctcagcctcggtgatccattgggcttctacctgtggatcgacacccggcaacgcctggcgggtgatcgtatcaattgcgcgggcaccatgaatggtgtgcaggaacgcttccacatccaagccatgccgtgcagcccagatgccccacacgcgctccgcagccgcaatggagttgagcagggtcccgtccatatcgaacagaaaggcgcggtaacgccgggtaaatacgtttggagttgggctggacactgcacggcttcctcatgggctgggcccctgcaatctacggatcaccttgacgcttgtaaacgccgagatctggcccgtcagttccgaggcaaaaatgacgaacttgtcatgatcctgttggttggctgttggggtcgcctggttaccgtgagctcactacccacccggaacgtgagacaccaccatgaaactgattgccctgggcttcgccgctttgctcgtcactggctcggtattcgctgccgacgccgcccctgccgccaacgtgatccacgacaaaaccggcttcttcgtccacctggatgtcgccaaggtgctgtcgagcaccgacacctacggccaatgcggggttgtgccggcgcaactgcgctacctggaccaccaagaccgcgtacacgtgctggattatcaagtccagggcaccggttgcgccaatgacaattgatcgggctacactggcgcaacttattgaagcagagcacttcccatgaacatccttgtagtcgaagacgaacccaaggccggcaattatctgctcaatggcctgcaggaactggggcattgtgtgagcctggcccgcgatggcgtggacggtttgcaccaggcccttgaaacgcccttcgacgtgatcgtactcgacgtgatgatgccgaaaatggatggctgggaagtgctgcgtcgcctgcgcaaagaggccgatacgccggtgctgttcctcaccgcccgcgatgacatcgccgaccgcatcaaaggccttgaactgggtgccgatgactacctgatcaagcccttttcgttcgccgaactggtggcgcgcctgcgtaccctcaaccgtcgtggcccgagccgggatgaagagcaactgcacatcgccgacctgcacatcgacgtactcaaacgtcgggtcacccgcgccggcacgcgcattaccctgaccaacaaagagttcgccctgctgcatctgttcgcaacgcaccaggaccaggtgctgtcccgctcgctgattgcttcgcgggtgtgggacatgaacttcgacagcgacaccaacgtggtggacgtcgccgtgcggcgcctgcgcctgaaaatcgacgacccgttccagctcaagctgatccacagcgtgcggggcattggctaccgcttcgatacccagccatgagccgccagcgcccttactccctgaccctgcgcctggcgttgatcttcgccctgctcgccttcgccttgttggcaaccctgggcgtggcgctgtaccgggaactggagcgcgaactgatccgccgcgatgacgccgcgctgatatcccgagtggatcagctacgcaacttgctcaacgacagcaataccttggacctgatcaagaccaagccagagctgttccagaacatgttgggcaaccgtgaatcggtgctgagtatcgccgcacccggccagcagccgctgctgctggtgaacccggggaacattgcgctgccgtcgatccagccgctgcccaaggatcaccggctcatgttgagcgacgtgcaacatttgcccggcctgaacggtattcccttctcgatggtggccgtggccatcgactccggcgacctgggcagcctgcaaatcaccagcggccgcctgatgaccgagcgcaccgcggtactcgccagttatcgtctgagcgtatacatcctggcgagtatcgccgcgatcaccctggcgctggtcggttacctactggtccatcgcggcttgctgcccttgcgccgtctggcccgacacgcccaagggatcggcgtcagcaacctggccgaacgcctccacagccacggcgcaccgaaagaattgctgcccatgatcgactcgttcaacaccatgcttgagcgcctggccaaaggttttgtacaactgggccaagtgtccaccgacatggcccatgaactgcgcaccccgatcaacaacctgctcggcgaaacccaggtggccctgcaacagcaccgcagcatcgagagctatcagcaactgctggcctccaatgtcgaagagctggagcgcctggcgcggatgctcgacaacatgctgttcctggctcgcaccgaccccgccagcgcaatgcgccaacgccaggcgctggacgccgcggatgaagtggaacgtatcgcagattatttcgaagggctggcgggtgatgtggacatgcacatcaccgccttgggcgaaggggtgatctgggctgaaccgatgttgctgcgccgggccttggccaacctgtgtgccaacgccatcaagtatggcgcgccgggctcggagctgagtatccaggcagtgccggatggcgcgggcatcaacctgagggtcagcaaccacggccagacgatcccggccgagcacctgccgcggctgttcgaacggttttaccgggtggatgaatcccgcgagcggtcgtcccagtccaacggcctggggctctcgatcgtggcgaccatcatgcagttgcataacgggcggtaccgcgtcagcagtgaagacggcgtgacatgctttgagttgtttttccctggccgtgaagcttgagggcgcggcaactcaatcaaacgcgccgttaaggacttcgtagatgatgccggtcgcaatggccaccaatatcaagtcggttcccgcttgctgccattcgtaaccatcataacgaggcaactgccccagcaagcggccgtcgagtttcttggcaatacccggcggaagtggctttccgcgtgccaggtttttctgaatgccaggcggtaaggccgggcccggacgccaataatcgcggtggccgcccaacacattcagcacacgacctcgatcaacgctgaagtcattgctggatgggccgcccttgtctttgcccttaccttgcccaccttgggcattacctttgttattaccgtgacctttgccggtgtcctgcccaccataggcatcacctttgttgttgccttggcctttgccattacctggatctgcaagggcaaggccactggtcacggacagtgctagcgacaacgcaaccgacacgaacttcgtacgctttaacatggcaactttccaaggcgagggtgtgctggaactgtagttgaaattgcaacacagcgtatagcgtcagctgatctggccaccggtaagaacgatatccgcctgggtttgccaggcggccaacgccgccgcacgcaacccttccacggtcgtcgataacgccatcgacggctcgcccgatccaggcaagccgggaacgtgaataaacccactgcgcaccccagtccccgccaacgcatgctgcaagcggtaaaacacctggttacacacaaacgtccccgccgtctgcgacaccgaggccgcaataccggcctcacgcagcgccttgaccatgcccttgatcggcaacgtcgagaaatacgccgccgggccgccatccactaccgcgatatcaatcggctgcgcgcccagattgtcgggaatacgcgcatcgttaacgttgatcgcaacgcgctcgatggaaatatcactgcgcccaggccccaggcccgtggcgatgaccattgccggctgcagttcgttgatcaactgcagcaaggtctcggcggcggtggcaaatgcgcagggcaagcaacgcgcaactatcttcacgccctcgctcaacggcacaccgtccaactggcgcacggcctcccaagaagggtttaccgccgccttatcaaagggctcgaagcccgtcagcaatacgttttgcacaatgacctcacatcaacaggtaaagcagcacgatattgaccaccagcatcatcagcgccgtgggtatctgggccttgatcactgcatttttgtccggcagttccaacagcgccgccggtacgatattgaagttggccgccatcggcgtcatcaacgtaccgcaatagccagagaacataccaatcgccgccatcaccgcaggattgccgccgtaaatccccaccagcaccggcacgccgacgccaccggtcatgaccggaaaggccgcaaaaccattgcccatgatcacggtaaacaaggccatgcccaacacatagaccatcaccgccaccaatttgtagtccaggttgatgtaagtggtggtgacatgagcgaccgccgtacccaccccggcctcattgaacaacagcccgagcatcgccagcatttgcgggagcaccatggcccaacccagggcttcggtcaggcgacgggattcgcgcaacgcttgcaccggcgtatcacgggtcagccagcaggccaggccaagggcgatcaggcaaccgatgccgagggagacaaaggtcgtgttcttcgggtccagcagcggtacaccaccgatttcggtgtgtttgagcaacactgagccaatcaccgtggtcagcggaatcgccaacgccgggatgaacaatttgtggcccaggcgcccggcactggcgcgagacgccttgtcgtgcaattgggcatgctggccacgaccaacgccgcccaagcccgcaatcaatgccatcaccaccacacccactccgatgaccaccgaaggcagccgctcgcctataaggaacggtacggcgaacaacaaccagaacagcgcactggaccagcgcttggggtgggaacggtcgagcaggatcatgccggcggtgatcagcaacagcacacccgccagccagtacaggtattgaatggaaataatcattgagcagcctccactggggcggcggccgagctcatttcgcgggtcaagcgccggtcgaaacgatgcagccggatagcgtggatgatgaaggcacagatcgccgtcgggatgccccacaccgcaatgtgcagcggctccacatcaatccccgagccgagcaggaaggtgtgcatcaacgcaatcgcaccaaaggccacgaagatgtcctcaccaaaaaacaacccgacattatcggtggcagcgcacatggccagtaccttgtgacgcagcttgtccggcagcttgccatagcgcttttccgccgcgccctcggccatcggcgccagcagcggccgcaccatctgcggatgcccacccaggctcgtcaaccccatggccgccgtggactcacgcacaaacagataaatgatcagcaagcgcccgaccgtggcgcgttcgaagcgggcgatccagttctgcgcatgcaggcgcaggccatggcgctccaacaggccgatcaccgccagcggcaataacaggatcagttgcagggcacgggtctgaaggaagccatcgcccatggtggcgaggattttttccagggggaactgggcggcaagccccgtggcgatggcggctgcggtgaccaccaacagcggattgaagcgcaatacaaagccgaccacgatgacaagtacgccgatcaacggccataagttcacaacagtttgcatggcggggaggtcctttagtgcgcgctgcggcgccattacagcaggatgtgagcaaagggctcacagcttgaaagtggcgtgcagtcggctcggtttttttattgttgacctggaaggtcgagcgtcagtggcggcaactttgctgcctggggccgggggtgtccaacaagaaaaattgttgctgcacaccaatattttttgtggggggatgacactgtacggtacggtgcctggaaggaattgagccgagtttttttgcacaaatcgtgtgggtgagctcgctatggcgtcggaagtgaaaattcctgatcagcacctatactccacgatgcagctgtgtgtacttgcagttcattcacggcgtcacgccgacaatgaggggttcccgctatgtatgccggacaaatgagtaatatggcgaccacgcttggcgaaatacgctgccaactgttcgcccaggtaatttgcctgctggcggtggcgacgctgttcgcctgattggactttcaagccctgaaaggacgccgccaggcgccttggctttgctgtgcccaaatttcacacaacaaaaaagggcccacctttcggtgagcccttctagaccgcccagcagagcggattttgtttggtaggcgcgattggactcgaaccaacgacccccaccatgtcaaggtggtgctctaaccaactgagctacgtgcctgctgtgaggcggcattctacggaattccgaaggggtgtcaacatcttttttgcagctaaccctatgaatatgcgaattttttatttgcgtcgggtacacccgtgatttccgggtggctggcaggcaattttcaactcaggtaggatcggcgcactcgtaaaaaatataaaacagaggttccaggatggcgaacaccccctacccccagtcgtattacgccgcttctgcgaatgaagtcccgccccgtcctgtgctgcaaggtgaagtcgagaccgacgtgtgcgtgatcggggctggctataccgggctttccagtgcgctgtttttgctggagaacggctttcgcgtcacggtgctggaagccgccaaggtcggttttggtgcttcgggccgcaacggtgggcagatcgtcaacagttacagccgcgatatcgatgtgatcgagcgcagtgtcgggcctcagcaggcgcagttgttggggcagatggcgtttgaaggcggcaggatcatccgtgagcgcgtggccaagtatcagatccagtgcgacttgaaggacggcggcgtgttcgccgccctcaatagcaagcacatgggccacttggagtcgcagaagcgcctgtgggagcgctacggccatacgcaactggagttgttggacgagcaccgcatccgcgaagtggtggcctgtgacaactatgtgggcggcctgctggacatgagcggcggtcatatccacccgctcaacctggcgctcggtgaagccgcggccgtggaatccctgggcggcacgatctatgagcaatcggcagcggtgcgcattgagcgcggtgccaatccggtggtgcacaccgctgaaggcagggtcagggccaagttcattatcgtcgcgggcaacgcttacctgggcaatctggtgccggagttggcggccaagtcgatgccgtgcggcacccaagtgatcaccacggcgccactgggcgatgaagtggccaagacgctgttgccccaggattattgtgtcgaggactgcaactacctgctcgactactaccgcctcaccagcgacaagcgcctgatcttcggcggcggcgtggtgtatggcgcgcgggacccggcgaatatcgaagcgatcatccggccgaaaatgcttaaggcatttccacagctcaaggacgtgaagatcgactacgcctggaccggcaacttcctgctgaccctgtcgcgcttgccgcaggttggccgccttggcgacaacatctattactcccagggctgtagcggccatggcgtgacgtatacgcacctggcgggcaaagtgctggcagaggccttgcggggtcaggctgagcgttttgatgcgtttgcggacttgccgcattacccgttcccgggtgggcagatgttgcgcacgccgtttgcggcgttgggggcctggtactacgggttgcgggataagttcgggatgtaaccactgtaggagcgagcttgctcgcgaaaaactcacagccgccgcattcattcagaataaacgcgttatcgttgaagtttttcgcgagcaagcccgctcctacacctacagggctgcgcttcagagctggtcgcgagcaatcccgctgcgaatccgcacgatatcggccaatactgccagcgcgatttccgatggcgtcctgctgcccaggttaagcccgatgggtgcgtgtatccgcgccaattcagcctcccctaacccaccgatacggcgcagtcgctcaaagcgcttctgcgatgtctgcaacgaccccatcacgccaatgtagaacgcgtcggtacgcaccgcttccatcatcgccagatcgtcgatacgcgggtcatgggtcagcgccaccaccgccgtatcacggtgacagccaccgtcggcaataaacaccgacggcaactggcgacgaatctccacgccattgagcaccacgccttcgagcacttcatcgcgcgggtcgcagaggatcacctcaaacccaagaccgaccgcaaactcggcacacgcctgcgccacgctggagtacccggccagcaacaaacgctgagccgcaccaacacggatgcgcacccggtcactgtcacgctcgatgcgcgcgccctgctcgcggtcagcaaacaggctgtgcgccccgctggccaggtacacctcgcgaatcaagcggcgctgcccgagcagcgccgactccacttcacgcaggtgcgcctgcacctcgcagtcaggctcgagcttctcaaccaagacatcgagaataccgccacagggcaggctgacccgcgagcgcggatcgtcccctgcgccatagcgcaccacgttgaccgcatcgagaaacgcaccttcggcgacgcgctcgagaaagtcttcctcgacgcaaccacccgacaacgacccaatccactgcccagcggcgttcaccgccagcagcgaacccggcgcccgcggcgccgagccgtaggtggccagtaccgtacagagccagatgcgctgtccggccaccgaccactccagcgcccgtcgtatcacctgcagatccagatgctgcatgtcagtgcgccttgtgctcgatggacggcgcctcagcctgcagcttctgcacgtcgcttaccgccagctccgccgattgcccgccccagccttggcgcaggtaattgatcagatcggtgagttgctccgagctgagttttccagcgaagcccggcatcggttgcatgtgttcgaacccggagaacttctgctcgccgatcccgtcctcaatcacccgtaccaggttgcgcgggtcttccagccgcagcgtggtgttgccgcgcatcgccaccgcgatgtgcggcttgccttcgccacctgccgcatggcaaccggcacagacgttcaggtattcctggcggccgcgctgagcgctcgggccaagtttctccaccggcacttcgaccaacgccttggctgccggcggtttatcgccgagcaggaaggtcgccatcgcggccaggtccgcatcgctcaggccctgggtgctgttgtgaaacaccgggaacatctcgttgaacattgagccctgagcgctcatgccgtgcttgaggaaggtgctcaggtcctgttcattccagccgcgcgcggccaggtccgtggcgagcaggctgggcgccagatagccattgaggatgccgccggtcaggcgcttgtccagctccatcgcaccgggcaggccacgtggcgtgtggcattcgccgcagtggccgagcacttcgaccatgtactggccgcgcttccaggcttcgctcttgccttgcgccggttccagtttcagcgctttgccgtacaacacgttccagcccatcaagcccaggcgcacgttgaagggaaagctcaggctcgtgaccggcgctgcgcgctcgatcggctcgatggttttgaggtacgcatgaatggcgtccgagtcttcacgcggcatcaggtggtacgaggtgtagggcatcgccgggtacaagtacgcgccgtcgcgacgcttgccttcagtcaacgcggcgaagaactcgtcatcgttgtacaagccgatgccgtgttccttgcttggcgtgatgttggtgccgtagatggtgccaaacggcgagacaatcggcaggccgccggcaaacggcgcaccgcccggtgcagtgtggcaggccatgcagtcagcggcgcgggcgaggtattcgccgcgcttggcttgatcatcagcgtgggcaaacaataccggcgcggccaggccgaccgccaaggccaggcgggtcagaaaaagcttcatgcttaaccctccttgaccaggccgagatcggtcagcacgttgcgggtggcgttgtaataacgcacgtacccggtacaacggcagacgtgatgaccgaggctgtcctcgatgatttgttccagcttgctgtacacggtcggctggcgttgcagtttctccactaacacggtcgccgcattgacgaagcccggcgcgcaatagctgcactgaaaggcgaactcatccacgaagcgctgctggatcgggttgagctcagtgacctggcccgactcatcgcgcttggcgtggccttcgatagtgcgcacttgcttgccttcaaagtaatgcgcgccggtgatgcaggtgcgcacttcttcgctggtgccgtccgggttgtcgacgatcaccacacaggcgtggcaaatgccttggccgcagcccagccgcgagcccgtgaggtttttgtattcgtgcaggtagtcgatcatcggcaggtcatcagggatgtccaccgggccgacggattgaccattgagggtcagttgaagcggacggttagccattgagggcctccttgatgcggacagccgtgattggcaggtcgcgaacacgtttaccgatggcgtgcgccaccgcattaccaatggccccgacaatcgggatcatcaccacttcagcgatacctttggacgggtcgctcggcgacagcgccggcagaatctccgaggtctgtttccacacggcaacgtgacgcgccatcggcaggcggtagcggttgaagttccagtcaccctcccccggcccgccttcgtacagcggcatttcttccatcaaggcgtgaccgatgcccatggccacaccgccttcgagctggcccttgaccaactcttcaaccagcacccgcccgcactcgatccacgaatggtgattgagcacttcgacctgcgccgaacccttgttgaccttcaactccaccaacgtggcgacggggctgtagtacgtcaccgcagcgttgttcaactgggtggcgggatagctgatgttctggcgatcgagcaggtggaaaccggcagtgctcatcagcgcctgcttggctttcggtgcgccgtcgccgtacttcaccgccagaccgtcgagcggcaggcgctcgcgcacgccgtcgatgctgtattcggcttcggcccagctccagcggttgaacccgtggaccgtggcagcggtgaccaggccgcgctcgtgcgcgcgcttggccagttcttcaaagctcaacggctgcataccgttggcggtgagcttgccgtcgacccaatgcgcgtcttcgcggcgtaccacataggggttggcctggccgccgaacgggccctggcgccagatctccagcgctgctggccacaggccgtggttgaacagcacacgcgccgcttcacgggtggcgtggctgaagtagtacgccgagttggtcgccgaagacgccgacgcgagcttgcccacccaacgcgggttgcgcagcaggttgtcctgctcggcctggctcatggtgtaagggttgccgccggtgaccagctgcatttcctgccactctgtttcgccagtcttcacttcgtgggccgggctgccgagaaaatcggcgaccaccagcgattgcgaagtggacatgccggtgccgatttcgataccgatatgacgcagactgatgcgaccgtcagcgctgaattcaacactggccatcggcgcttcggaacctgtgccgaagtctttctggcagatggcgaaaccaacgccataccagttatccgggtcggcggcttcgcgttgttgcttgatcgcgtcgcggtttttccatacgtcgtgcgcagcggccttgtcgagaatttcgtgcaggcgcaacgcaccggcagggatcgcgccctgggtgttcttcatgcccgaacgcagtgcgttcttgcgccgcagctcaatggcatccacacccaggcgcccggcgatttcgtcgaccatcatttcggtcgccgccatgctttgcagggtgccgtagccacgcatcgaaccggcttcaacgccacgggagtggtacgcggtcacttgcaggtcgttctgcggcatgtagtagatcgactgcgccgccgtggcgccgaccgcagccaccgatgggctgtagttgatccggccaccgccgtcgacgctcatgtcggcgaggaaaattttgaaactgtggtcgtttttgtcgaccgccaactgatagcgaatatcgaacgggtggcgtttgatgccgctctggaattgctcgtaacggtcattggccagacgcaccggcacgccggcgccatacaacgcagcgagggcggcgtagtagacgaaaatgttgtggtctttggagccgtaccccacggtgtaacccgggtgcatgttcaagtgggccaggccgaagctcgacggcgagatcattttggcggtctcggtcgcgacttccaatgggcactgggtggccaccacaaagtgcagggtcttggtcgccggatcgtaccaaccgttgccgttgtccggctccatggcggccggttcgatcgatggggttttgtagcgctcgtcaaataccagccagttgtccggtggcgtgttgatctggctcttcatgcgctcggcgtagaacagcccgcgctcggtcaggttgccgtgcaggtttggctgggaattccacactgggcgacggtttttcagcatcgggaacaggatcgaatccttgaggctggcgaattcgtcttcgtcggccgaggtcgggccacccacgcgcacgtagcggaagctaccgtaggggtcaccttcgtaatacggcactttggcaccgtaacgaatcgccttgtcattgaacttgagcttgttcttggcctggcggaaacgctcgaagtcgttccagatcaggatcgccaccgggtgaccgatgaacatcggcactttaccctcgggcagcaacgggtccggcgcatgctcttccgggaagacgataccgtccttgtccaggtcggcagcggtgacaatacggtccggctgcagatcggcgccaagccacgacaggtcgtagcccgcgtagatgtggtcggccttgatggttttaagcaacatggcgtgaccttgctgctggggccagccgggcatgtccttggaacggatgtcgcgggcaaacaccttgctgccgcagactttcgacaaggcatcgttacgctggcgcgccttgccgttatggccgagccacttttcagacggcacggtcacgctgttttccatcaaggcagccagcgcctgggtgctgagcggcgtgagcgtgacactcacacccgccaccagcccgccctggaggaacgagcgccgggttatttcacggttggacatggatcatcctctgagcggttataaatccgcccttatggttaagtacaccgaatctggagacttgcagaagcctttctcgacgaatcaaaaggccatgatgacagtgcaaagttgaccgaagggttaactttaaaggtttctgcgcctgcggcaaataaccacattgaaattttttgacacaagaacgcaaaacggccgacagaatcgaaatgatctgtcggccgtttgccgataatgagcgctggtggtagcgaagaagatgaggtttttttcaaacccccagacacaaaaaaccccggtctttcgaccagggtctttgctatcggatcaaggtgagccagtggctttccttgtgcttcaaggcgttcagtgggccttgaggcagatatggcgcagcggacgggactcgaacccgcgacccccggcgtgacaggccggtattctaaccgactgaactaccgctgcgtatcgcttggctgattgagcatgaaccctcaaccacctttaaacatctgactgatcagcgttggctgttcaatctcaagcccgacacatcgaacctggaaaatatggcgcagcggacgggactcgaacccgcgacccccggcgtgacaggccggtannnnnnnnnnnnnnnnnnnnnnnnnnnnnnnnnnnnnnnncccgcgacccccggcgtgacaggccggtattctaaccgactgaactaccgctgcgcgtcggtgcaacctttaacgttgcgtcttgcccgagggcaaaactctcaagaagtggtgggtgatgacgggatcgaaccgccgaccctctgcttgtaaggcagatgctctcccagctgagctaatcaccctttgcttcgttgaggccgcgaaatttacgcaggtagcggacctaagtcaatagcctgcttgaagtttttctgaaaaagacaaaaatgacttcaagacggctaccggccctactcgctgtaaatcatcttcttgctcatgccgccgtccaccacgaactcttgcccggtgacgaacccggcctggcgtgacagcaaccaggccaccatcgccgccacgtcctccaccgtccccaccctgcccgccggatgctgggcatgatcggcgtcggtgagcggttctgcacgccgcgcagccgggtcacgtgcgtcgatccagccagggctgaccgcattgacccgcacttccggcccaaggctcatggccagggcgtgggtcagggccaacagcccacctttgctggccgcataggcttcggtgtcaggctcggattgacgcgcccgggtcgaggccaggttgacgatggcaccgccatgggcacgcaggtaaggcgcgcagtgcttggccaacagcatcggcccgctgaggttgaccgccagcacgcgattccagtacgccaggtcgaggctttccagggtgatattgcgcgggtcggccaccgccgcattgcaaaccagcgcgtccaggcgcccgaactgccccagcacctcggcgacaccctgggccacttgcttctcgtcggccacgtccatggtgataaaccaggcattgtcgcccagcaccttggacaccttggcaccgcgctcgcggtccaggtcggtcagcaccacctgccagccttcactgatcagccacgcggcaatcccgaggccaatgccccgcgccgcgcccgtcaccaacgccacgcgcccgttactggccgctgcggcctccatggaccactcgatcacaaggccgccagcccgcgggccaggtctgcctgcaagtcggcaatgtcttccaggcccaccgcaatgcggatcaggctgtcacggatgccggccgcttcacgctcctggggcgccaggcgcccgtgggaggtggtgctcgggtgggtgatggtggtcttgctgtcacccaggttggcggtaatggagatcaagcgcgtcgcgtcgataaagcgccaggcgccgtctttgccgcccttcacttcgaaactcaccaccgcaccgaaaccacgctgctggcgctgggccaaggcgtgttgcgggtggctcttgaggccggcgtaatgcaccttctcgataccgtcctgttgttccagccactcggccagggcttgggcgttggcgcaatgggctttcatgcgcaggctgagggtttccaggcctttgaggaagatccaggcgttgaacgggctcagggtcgggccagcggtgcgcagaaagcccaccacttccttcatctgctcgctgcgaccagccaccacgccgcccatgcaacggccctggccgtcgatgaacttggttgccgagtgcaccacgatgtccgcacccagcttcagcggctgctgcaaggccggggtgcagaagcagttgtccaccaccagcatcgcgcctttggcatgcgcgacttcggacagcgcagcgatgtccaccagctcagcgagcgggttggacggcgattcgacgaacaacagcttggtattggccttgatggccgcctcccaaccggacaggtccgccaggggtacgtagtccacttcaataccgaaacgcttgaagtacttttcgaacaggctgatggtcgagccgaacacgctgcgcgataccagcacatggtcgccggcgctgcacaggctcatcacaaccgccaggatggccgccatgccggtggcagtcgccacggcctgctcggcaccttccagggccgcgatgcgctcttcgaacgcgcgcacggtcgggttggtgtagcgcgaatacacgttgcccggcacttcgccggcaaagcgcgcagcggcatcggcggcagtacggaacacgtagctggaggtgaagaacatcgggtcgccgtgttcaccttccggggtacggtgctggccggcgcgcacagccagggtatcgaaagctacgccatcgaggtcgctgtccaaccgaccggcatcccattcctgactcatgctgcgactccttattcaattctttatttaagatacaaaaccggcccctcagggccggtgtttactcagttgttatacagatcgatgatcgcgctgaccgcctgggtcttgatcttcgacgagtcgttgcgcgcctgttcgatcttgttcaggtaggcctcgtcgacatcgccggtcacgtacttgccgtcgaacacggcgcagtcgaactgctcgatcttgatcttgccaccgccaaccgcttcgatcaggtccggcaggtcctggtagatcagccagtcggcgccgatcaggtcggccacatcctgggtagaacgattatgagcgatcaactcatgggcgctcggcatgtcgataccgtacacgttcgggtaacgcaccgcaggcgcggcggaacagaagtacacgttcttagccccggcttcgcgggccatctggatgatctgcttgcaggtggtgccgcgcacgatggagtcatccaccagcatcacgttcttgccgcggaactcgagctcaatggcgttgagcttctggcgtaccgacttcttgcgcgccgcctggccgggcatgatgaaggtacggccgatgtagcggttcttcacgaagccttcgcggaacttgacgcccaaatggttggccagctccagcgcagcggtacggctggtgtccgggatcgggatgaccacgtcgatatcgtgctcggggcgctcgcgcaggatcttctcggccagcttctcgcccatgcgcaggcgcgccttgtagaccgagacgccgtcgatgatcgaatccggacgcgccaggtagacgtgttcgaagatgcacggggtgagtttcggcgctacggcgcactgacgggtgtgcagcttgccgtcctcagtgatgtagacagcttcgcccggcgccaggtcgcggatcagggtgaagcccagcacgtccagggacacgctttcagaagcgatcatgtactcgacgccttcgtcggtgtgacgctggccgaacacgatcgggcgaatgccgtgggggtcgcggaaaccgacgatgccgtaaccggtgatcatcgccaccaccgcataaccaccgacgcaacggttgtgcacatcgatcacggcggcgaacacgtcttcttcggtcggctgcagcttgccgcgctgggccagctcgtgggcgaacacgttgagcagcacttccgaatcggagctggtgttgacgtggcgcaggtcagattcgtagatctccttggccagttgttcaacgttggtcaggttaccgttgtgcgccaaggtaatgccgtaaggcgagttgacgtagaacggttgagcttcggccgaggtcgagctaccggcagtcgggtaacgcacatgaccaatgcccatgtgcccgacgaggcgctgcatgtgacgctgatggaacacgtcacgcaccaggccattgtccttgcgcaggaataaccggccgtcgtggctggtcacaataccggcagcgtcctggccgcggtgctggaggacggttagcgcgtcatacagcgcctgattgacgttcgacttaccgacgataccgacgatgccacacatgcgacgcaacccctacttaatgaatcttgactgaacacagcttactgaggcgttttggccggcaagaggtgttccttgaacggaagatcagcgggtacgctgattccgctggccagccactgactgctccaccccaatatgaggtttttggaccagtctgcaaccaatagaaattttggcacgagtaccgactcctgccaccacgaatcctgctgtaccggccccaggctcaacagcccgaccgccacgaccaccagcagcgcgccacgcgcagccccgaaggccatgccgagaaatcgatcggtcccggaaaggccggtgacacgtatcaactcgccaataagataattgaccattgcccccaccaacagcgtggcgatgaacatgatggcgcagcccgcgatgacgcgagccgaaggtgtctctatgtacccggccaggtagaccgacagcgaaccaccgaacatccaggctacgactcctgcgatgatccaggtcagcaacgacagtgcttcttttacgaagccgcggcttagactgatcaaagcggagatggcgacgattgcaacgatcgcccaatcaacccaggtaaatggcacagtgcagcctacgtacggataaggcggcgcattttagcagagcgccgggctatcggtaagcggtgattgcgggtgctttgcaaatcaatagattgggcggtgtgaacgccatttcaagcccaccataaatcaatgtgggagctggcttgcctgcgatgagggcggaacattcgacatcgttgtcgattgaaccaccgccatcgcaggcaagccagctcccacatttaccagccaaagccggcggttgttcagccgcgctcgggctggaaacgcaccacgaaaccgttgaggttctgctggcgacccagcagatcgcgcaggcgatctgcctcggcacgctcgatcagcggcccgacaaacacacggttcttgccgtcggcgctgcggatataagcgttataaccctgggctcgcagctttttctgcagggcgtcagcactttcgcggttggccaggctggccagttggatcgaccaactgatcggcaggccattagggtcgatgcggctctggcccacatccggcttgcccggtgccgcaggctgcggcgctaccggtttgggcactggcgcaggggcggccggcttggcagcaacggccggtgccggggtcggcttgaccaccgggacactcggctgcaccggcatcgagggcgcctcttgcgcggcaacgtcttcatcggtgggcacaggttcttgcggcaacgcctggggctcaggcaccaccaccggctcgacctgaacctgcggcaccaccggtgcctggggcgcggcaggggcttcaaccaccacctggcgctgttcgtcctggcgggagaacagcatcggcagaaagattaccgccaacgccaccagcaccaaggccccgaccattcgctgcttgtatgcgctatccagtaatgccatgtgcagcttcctccgtggagcgccgggccagccattcaagcgcctcggcaacacaataaaatgatccgaacaacaggatttcgtcctcggccgtcgctaccgcacactgcgcctccagggccgcagtgacgcttgcatacgacgccaccggcgcgccaaggttctgcaaggcagtttccagctcagcggcgggacggctgcgcggcgtatccagcggcgcaacagcccaagactggacgctgcccagcagtggcgcaaccacgccgtccaggtccttgtcgaccaacaacccgaacaccgccaggcgacgctccaacggcggggtacgcgccagacgctgagccaagtactgcgcagcatgggggttatggcccacatccaacatcagactcaggcgcttgccttgccagtcgaaggttcggcgatccaggcgccccaccactttggttgccagcaaggtcgcggcaatctgcgcggcatcccacggcaggtccagcagcagataggcttgcagcgcgagcgcggcgttttccatcggcaggttcagcaacggtaaatcaagcagctctacccgttggccacgtgcatcctgcccacgccattgccaatgggtgtcgccgatgtccagagtgaattcgcgaccgcgcaggtagaacgggcaatccagttcgcgcgccttgtccagcaagggttgcggcggatccaggtcaccgcacagcgccggacggccctggcggaagatcccggccttttcaaaagacaccgattcgcgggtattgcccaggtagtcagcatgatcgacacctatgctggtcaccagggccaggtcggcatccaccacattgaccgtatccaggcgcccgccgaggccgacttccagcacgaccacatccagttgcgcacgctcgaacagccagaacgccgccagggtgcccatctcgaaataggtcagggagatgtcgccacgcccggcctccagcgcagcaaaggcttcgcacagctgggcatcagtggcctctacgccattgagctgcacccgctcgttgtagcgcagcaggtgcggcgagctgtacacgccgaccttgaggccctgggcctgcaacagcgcggcgacaaaggcacaggtggagcctttgccgttggtgccggtcaccgtgatcacacgcggtgccggctggcccaacccgaggcgggccgctacctgttgcgagcgctccaggcccatgtcgatggcggacggatgcaactgctcaaggtaggcgagccattcgcccagggttcgttgggtcataggtttgcaggcaccggcggcacgacgatcggctcgaccttaggcgcaatgtacacaggcgtcggcaggcccatcatttgcgcaagcaggctgcccaggcgcgggcgcaattcgccacgcgggatgatcaggtcgatcgcaccgtgctccagcaggaactcgctgcgctggaagccttccggcagtttttcccgcacggtctgctcgatcacacgtgggccggcaaagccgatcagcgctttaggctcgccaacgatcacatcgcccaacatcgccaggctggcggacacgccgccgtagaccgggtcggtcagcacggagatgaacgggatgccttcttcacgcagacgcgccagtaccgccgaggtcttggccatttgcatcagggaaatcagggcttcctgcatacgcgcaccaccagaggcggcgaagcagatcatcgggcaacggttttccagggcatagttggcagcgcgaacaaagcgctcaccgacgatggcacccatggagccgcccatgaaggagaattcgaaggccgaaaccaccactggcatgcccagcagcttgccgctgaccgaaatcagcgcgtctttctcgccggtctgcttctgcgcgccgaccagacggtccttgtacttcttgctgtcgcggaacttgagacggtcaaccggctccaggtcggcgcccagctcattacggccgtcggcatccaggaagatgtcgatacgggcgcgtgcgccaatacgcatgtggtggttgcacttggggcaaacgtccagggtcttttccagctccgggcgatacagcaccgcgtcgcaggatgggcatttgtgccacagaccttcaggaaccgagcttttcttcacctcggaacgcatgatcgaagggatcagtttgtctactaaccagttgctcatgctttcttttctccagtaccggtggcttgaacacagccccgcgtatgcccttgagctaaattcatatgtggcgatgacacaggcgggacggggtcagacgttggacctgccatttcccgcccgtatcctcagccttccagacaacctgccagcgcagggttgccacttcgtttccgggccacccacaggcggcgccgggctgttttacacagtggtagttatggacggcggcagactgccagccgtcacatcccacccctgctgttgcgcacggcctgcatgaacgcgcgaatcttgctcgggtcctttatccccttgccctgttccaccccaccgctgacgtccacggcatacggccggacctgttcgatggccgcctggacgttctcaggggtgagcccacccgcgaggataactggcttgctcaaaccctcgggaatcagcgaccagtcaaacgcctcgcccgtaccaccgggtacgccttcgacgtaggtgtccagtagaatcccgcgagcgccggcatacgcggcgcaggctgcggcgatatcgtccccggccttgacccgcaacgccttgatgtacgggcgctgatagctttcgcattcctctggcgattcgtcgccgtggaactgcaacatatccagcggcaccgcatccagggtttcgttgagctcgcagcggctggcgttcacgaacagccccacggtggtcacaaagggcggcaacgcagcgataatcgcccgcgcctgcagcacattcaccgcccgtgggctcttggcataaaacaccaggccaatggcatccgcccccgcttcgaccgccgccagcgcgtcttctatgcgggtaatcccgcaaatcttgctgcgaacggctgacatgtcgtaggaacctcagggttggaccgagaaagtcccggatggtaacaaaagcttttccgggcgtcagccgccaagttcgctgaaaccggtgaggaagtgcggcccgataaagcgttccggcagttcgaactcgtcgcggtactccacatccaccagatacaggccgaacggatgcgccgtgaccccgcccgtgcggcgaatgcggctttccagcacttccttggcccactccaccgggcgctcaccggtgccgatggtcatcagcaccccagcgatattgcgcaccatatgatgcaggaaggccccggcacggatatccagcacgatcatcttgccgtgccgcgtcacccgcaggtggtggacttccttgatcggcgacttggcctgacactggccggcacggaaggcgctgaagtcatgcaccccgaccagatgctgcgcggcttcggccatgcgctcggcatccagcgggcggtggttccaggtaatctcttcattgaggtgcgccgggcggatctgatcgttgtagatcacgtagcggtaacgccgggcgatggccttgaaacgcgcgtggaaatgcgccggcatgaccttggcccagctgacgctgacgtcatggggcaaattgatattagcgcccatcacccacgccttcatcgaacgctcggcctgggtgtcgaagtgcaccacttggccacacgcgtgtacaccagcgtcggtacgcccggcacacatcagcgacaccggcgagttggcgactttggacagggcattttccagggtttcctgcaccgtcagcaccccggaggcctgacgctgccagccgcgatagcgcgagcctttgtattccacgcccagggcgatgcggtaaaagcctgcggccgccatttcggcagccgcgttatctatatttgccaagaactgtgagcctgatgagttgcgcaaaggcgggcattatagggcgtcagggtgcatgagtggactttaaatgtgggagcggggttgctcgcgaatgcgccgtatcatccagcacatcagcagttgaaccaccgcattcgcgagcaagccccacatttttctgcgtcggccgttagattcggccgagcatttccttggcttcgctacgctgaccttcgtcgccttcggtcagcacttcagacaggatgtctttcgcgccttcggcatcgcccatgtcgatgtacgcctgggccaggtcaagcttggtggccacttcattggtgccggagaggaaatcgaactctggctcgtcctcagcacccagcgcggcatcttcagctgtgaaggaaggcccgatcggcggatgttccaggctctgagacaaacgatccagctcagcattgacgtcgtccagctccgaagcgaaggcatcggacttggccgcaggcgcgctcggctcatccgccagcgacaggtcaaagtcttccggcaggtcgaattcgtccagcgcagccggcgtcagggtcggcggctctaccggcggtacatccttgatctgcccttccaggcccgacaggaagtcgtcatcggattgcgacgcgggcgggtccaactgcaggtccaggtcaaagtccgacaggtccggcgcatcggccttgggctcggtctgttgtttgagcagcgattcaaaggtttgctggtcttgcgcgatctcggccggcgaggcagcttccaggtcatccaggctcaggtcgaaatcggtgtcgaaggtatctgcctgcggggctggggtcggcttgtcgtcgagcaggtccttgacgtactgcgcatccagggctgcggcggccactgcggcactgacacccgcggccaacacggccatggccgggaaacgcgccttgagctgctcgacctgagcatggttctcaccgttggccaccaactggcgctcttgggtaacgaacccgtccttgttgttctgcaggccatagacttccatcagcttcaaacgcaggtcgctgcgtttgggctcgcgcttgatggcttgttcaagcacatccgccgcctggttcaggtggccacggtcgatatgggactgggcctgggccagggcgtcgctggaattttcctgagccacggcaaccgccaacggcgccagcacagaggcgaccgtcggtgccacaaccgtctcaaccaccggtgcaggcgcgggtgctggcggcgttgcggtgtcgagcttgacgctcggcggcggtacttcaagaccctcgaagctgtcaggcggcaggtcttgatcgatattggaaacgaactcaggctcttcggccaacgcccgcgccatgcgcagatgcttctcttcttcgcgacgagcattgcgatggcgtgcccacagcagcagaagcagcaacaccaccagcagggccgcaccgccaaggatgccgagcacaatcgggttggtcagcaggtcgttgaacttgccttcagtgctggccggcgcggcagctggcttaaccggttcaggcgctggcgctggtgttgcagcgggagctgccggctcggctgcaggttcacccggcaactgcgcgggcatcgcggcggtctgtggttcacccgtttgcgcctgcaaacgagccaactggtcattcttgagctggatcagcttttgcagcttgtccaactggctttgcaagtcggcggcacggcttttcagctcttcgttgtcgcgccgcgtggtgtcgagctcttcctgggtcatcgccagcttgtcgctcagggcgcggctgtcaccgacggtgccctttccacctttcttggcggcttcggccgacaccaggctcaaattgtccttggcctgggtgctcgacggcgcattgccggcctgggtgcgcttggtcgcgtccaactgtggcttgccggccacttggctctgcgggccacgacggccctggcgccaggcggcgttctgcgcgctcacttcggcgatcgcttgcggctgcgccagggcggtgctttgcgtagcgtccggcaggcgcaggacctggccggttttcaggcggttgatattgccgtcgacaaaggcatccgggttaagcgcctggatggccagcatcgtttgctggaccgaggcgccattgcgattctttgcggcaatttcccacaaggtgtcgcgggacgtggtggtgtgctgggcaggcgtgctggcggcaggtgcggtactggctggcgcggtgctggccggcgcgctcgccgtcggggccggctggtcgaacttggccgggtcgagcagcacgctgtaatcacgcatcaaacggccattgggccattgcacctgcatgaggaagcgcacataggaatcgggcagcggcttgctggaggtcacgcgcaccacgctgcgaccttcggggttgatcaccggggtgaacgtcaggtcatcgaggaacgcctggcgatcgacacccgcgtccacgaaggcctgggcagacgccaggctgggggtgatctcggacgcggtgaggccgcccacatcgcgcaattcgatttccacggacagcggctggttcaacttcgacttgagggtcatctccccaagttgcagcgcctgcgccataccggaggacagcgccgaggcggccgctattgctaacaccagtttgcgaacttgaaccatagcctcatcctttgtttgaacgcttcccgccctgcgagaaggttggtaaccgctgccattaggcatggcgagccgataggtcaccgacgcgcttgtgtttcacttgggaccaagcatagcgcctggttagaatcaatctacaaattgccgccaagtatcttttacacaaggccttttatcaacaactgcgccagctccacggcgttcagggccgagcctttgcgtacgttatctgacgtcagccaaagatttagttccgccgggtcgtcgataccggcgcgaactcgccctacgtacaccacgtcctggccaacggcatcgcctacggccgtggggtaatcgccctcctcgacccgctcgatacccggcgcagcctcgagggcgcggttcaccgcggccaggtcgaccggcgcggccagttgcagcgacacagtcaggctatcgccgaaaaacaccggggcttgaacgcaggtggcggaaatctttagtaaaggtgtttccagcacggcgcgcagttcgtggacgagacgtttctccagggcggtatgaccttgggcatccggcgtgccgacttgcgccagcaggttgaacgccacttgccgatcgaagaacgccggctccagggggcgtacgttcagcagctcggcggtctggcgcgccaactcgctgacggcctcgcggccctgggcagagatggccaggttggcggtgacgctgacgcgctggatgtccaccacaccgcgcaagggcgccagcaccaccgcgaggtacgtggcacaggggctcgggctgccgagttgaaaaggctttttcaacgcgttcagcacatgggcgttggcctgcggtaccacttgcggcgcctgctcggcgggcaatgcgccggacaagtcgatcaccgcgcagccagcggcggtggcacgcggggcgaaactcagggtcaccgctgggcctgcggcgaagaacgccaactgcaccttgctgaagtcaaacgtgtcgacttctttgacccgcacgttcttgccccgaaacggcaccgaagcccccgccgagttgctgcccgccagcaggtgcaaggtgcccaccgggaactccagctcttcgagaatctgcaccagggtttcgccaacggtaccggtggcgccgatcacggcgatttcaaaggtctgggtcatgggattgcctcgggcattacgggggagcggcactttaccgggtggtagagggtgaggcaattacagcccccctgatcgttcccacgctctgcgtggaaacgcctcctgtgacgctccgcgtcacgcctctaaagcagacgcagagcgtccagagctgcattcccacgcagagcgtgggaatgatcacaaaggcaacaaaaaacccgcgcctgtcaccagaacgcgggtttctgttattgcttcaagcgatcaacgctccagcaaaatccgcaacatgcgacgcaacggctcagccgcgccccacagcagttggtcgccgacggtgaacgcgccgaggaactgactgcccatgttcagcttgcgcaggcggcccaccggtacattcagggtgccggtgaccttggtcgggctcagctcctgcatgctgatatcgcggttgttcggcaccagcttgacccatgggttgtgctggctgatcaacccttcgatatcggcgattggcacgtctttgttcagcttgatggtcagtgcctggctgtggcaacgcatggcgccaatgcgcacgcagataccatccaccgggatcgggttcttgaagcgacccaggatcttgttggtttcggcctgggccttccactcttcgcggctctggccgttaggcagttccttgtcgatccacgggatcaagctaccggccaatggcacgccaaaattctcggtcgggtaagcgtcgctgcgcatggcctcggccacacggcggtcgatatcgaggatcgcactggccgggtcagccagttgatcggcgacagcggcgtgggtcgcgcccatctgcttgatcagttcacgcatgttctgcgcgccggcgccggaggccgcctgataggtcatggcgctcatccactccaccaggcccgcttcgaacaggccacccaggcccatcagcatcaggctcacggtgcagttgccgcccacgtagttcttagtgccggcgtccagttgctgatcgatgaccttgcggttgaccggatcgaggatgatcaccgcgtcatcctgcatgcgcaggctcgaagcggcgtcgatccagtaaccctgccagccggcttcgcgcagcttggggaagacttcgctggtgtagtcgccaccctggcaggtcaggatcacgtcgaggctcttcaactcttcaatgctgtaggcatccttgagcggggcaatatccttgcccacggacggcccttggccacctacgttcgaagtggtgaaaaacaccggctcaataagatcgaaatcctgctcttccagcatccgctgcatgagcacggaaccgaccataccgcgccaaccgatcagacctacacgtttcatcgcaactacaccttgttaaaaagtgggccgccttgcagcaacaactgcaagcgggcccgagagattacagattccgcagcgcggcgactactgcgtcgcccatttcttgcgtcccgaccttggtgcaaccctgggaccagatatcgcccgtgcgcaagccctgatccagcaccaggctgacggccttctcgatggcgtccgccgcatcgcccaggttgaagctgtaacgcagcatcatcgacaccgacaaaatcgtcgccaacgggttggcaatgccctgccccgcgatgtctggcgccgaaccgtggcacggctcgtacatgcctttgttgttggtgtccagggatgccgacggcagcatgccgatagaaccggtgagcatcgacgcctggtcggacagaatgtcgccgaacaggttgtcggtgacgatcacgtcgaactgcttgggtgcacgcaccagctgcatggcggcgttgtcgacgtacatgtggctcagttcgacgtccgggtaatccttggcgacttcttcgacgatttcacgccacagctggctggaagccaacacgttggctttatccaccgagcagacttttttgccgcgcacgcgcgccatgtcgaaaccgacacgggcgatacggcggatttcgctctcgctgtatggcagcgtgtcataggcctgacgctcaccattttccaactcgcgcacgccccgtggcgagccgaagtagataccgccggtcagctcacgcacgatgaggatatccaggcccgccaccacttccggcttgaggctcgacgcgtcggccagttgcgggtagaggatggccgggcgcaggttgccgaacaggcccagttgcgcacggattttcagcaggccgcgctcagggcggatgtcacgttcgatcttgtcccatttcggcccgcccacggcgccgagcagcacggcatcggcagcccgggcgcggtcgagggtctcgtcggccaggggcacgccgtgcttgtcgatggcggcgccgccgatcacatcgtggctcagctcgaagcccaggctgtacttgctgttggcaagctcaaggaccttgaccgcttcggccatgatttccggaccaataccgtcgccagggagaatcagaatctgcttgctcatgctttcctcatttcatcgggcgacccgcccacaggcaggtcgggaaccatcaatcagcgttcggcgaagaccaccagcacatcggtgctgaaggtgccgtcggcttgaatttcgtaatagtcgcgtacttcctggcccatcgccttttgcagctccaggattgctgcccgcagtacctcgggcgtgcgcatgcgctcgacccacgaggtgtattccaggcgcaagcgttggcggctgctgttgcgtacgtgcaggccggcctcactcaactggcgcatccactcggcgccggagtaatcacgcacgtggctggtgtcgcgcagcacttcgacggtttgcaggtaagtgtccaacagtgggctgcccggtgacaagacatccacaaatgcagccacgccgcccggcttgagcacccggcgcacttcacgcagggccaggccgaggtcgctccagtgatgggccgagtaacggctgaacacgaagtcgaactcgccatcggcgaagggcaggcgctcggcggcgccgtgcacggtgcggatgttggccaggttgcggtctttggcggcggcggccaccacgtcgagcatctgctgagacaggtcgtaggccaccacttctttaaccagaggcgccacgtggaagctgacatgaccggcaccgcagcccaggtccagcagtcgcgcagcgccctgcccggccagttcggcttgcagcacggcgaattcggtgccctgggcgtgtacggcgctgctcaggtaggccgaggcttgctcgccgaattgtttttgcacgacttgggtgtgggcgggggtggtcatggaggctttccttgggtttgtggtggttgcactggcgctatcgcaggcaagccagctcccacagttggaatgcactccaatgtgggagtcgggcttgcccgcgatgaggcccgcacggtttaccgcaaatcaggcatcgcgaaacaaccagggctggctcgcccggtgcttggcttcaaacgcagcaatcgcatcgccgtcctgcaaggtcaggccgatgtcgtccaggccgttgatcaggcagtgcttgcggaaggcatccacttcaaagtgatacaccttgccgtccgggcgggtcacggtttgcgcggccaggtccaccgtcaactggtagccgacattggcttccacttgctggaacaactcgtccacttcagcgtcgctcaagatgatcggcaacaggccgttcttgaagctgttgttgaaaaagatatcggcgtagctcggcgcgatgatgctgcgaaagccgtactcttccagggcccacggggcgtgctcgcggctggagccgcagccgaagttttcccgggccagcaacacgctggcgccttggtagcgctcggcgttgagcacaaagtccttgttcagtgggcgcttggagttgtcctgataggcgtagcccacgtccaggtagcgccactcatcgaacaggttggggccgaaaccggtgcgcttgatcgacttcaaaaattgcttggggatgatctggtcggtatctacgttggcacggtccaacggcgctacaaggcctgtgtgttgggtaaaagctctcatcgggttttcctcagatcaattcgcgaacgtcgatgaaacgaccgttgacggcagcggcggcggccatggccgggctcaccaggtgggtacgcccacccgcgccttggcgcccttcgaagttacggttggaggtcgacgcgcaatgctcgcccgactccaggcggtccgggttcatcgccaggcacatcgagcagcccggctcacgccattcaaaaccggcttcgaggaagatcttgtccaggccttcggcttccgcctgggctttaaccagcccggaacctggtaccacaatggcttgcttgatggtcgaggccaccttgcggcccttggcgatcaccgccgcggcgcgcaggtcttcgatccgcgagttggtgcaggagccgataaatacgcggtccaactggatgtcggtgatcgcctggttggcggtcaaccccatgtatttcaaggcgcgctcgatggagccgcgcttgaccaggtcggcctctttggccgggtccggcacgttctggtcaacggccaagaccatttccggcgaagtgccccagctgacttgcggcttgatctgcgcagcgtcgagttcgaccacggtgtcgaacaccgcatcggcgtcggagaccaggtctttccaggcttcgacggcggcgtcccaatcggcgccttgcggcgcgaacgggcgacccttgacgtattcgacggtcttttcgtccgccgccaccatgcccacgcgggcaccggcttcgatggacatgttgcagatggtcatgcggccttcgatggacaggtcgcggattgcactgccggcgaactcgatggcatggccgttaccaccggcagtgccgatcttgccgatcacggccagtacgatgtccttggcggtcacgccaaacggcaattggccttcgacgcgtaccaacatgttcttcattttcttggccaccaggcactgggtggcaaatacgtgttccacctcggaagtgccgatgccatgggccagggcgccgaacgcaccatgggtggaggtatgggagtcaccgcagaccacggtcatgcccggcaaggttgcaccctgctccgggccgatgacatggacgatgccttggcgcacgtcgttcatcttgaattcggtgatgccgtactcgtcgcaatagtcgtcgagggtctgcacctgcaaccgcgagacctggtcggcaatggcttcgatgccgcccttgcgctcaggcgtggtgggcacgttgtggtccggcgtggcgatgatggagtcgacgcgccaaggcttgcgcccggccagtcgcaggccttcgaacgcttggggcgaggtcacttcatggatgatgtgacggtcgatatagatcagcgacgatccatcatcgcgacgtttcacttcatgggaatcccaaagcttgtcgtaaagcgttttgccggccatcagtcggtcctcatcagcggtgcttctatacgccgggcttttcaataaccctttggcttgtgaggctgatggtatggcgctacattaaataactcaaattcatattttttatgctttggattaccaactggaatatcaccatggacctggccaacctcaacgcctttatcgccatcgccgaaaccggcagtttctccggcgccggcgaacgcctgcacctgacccagcctgccatcagcaagcgcatcgccggtttggaacaacaattgaaggttcggctgttcgaccgcctgggccgtgaagtcggcttgaccgaggccgggcgggctttgctgccacgcgcttatcaaatcctcaacgtgctggacgacacccgccgcgccctcaccaacctcaccggcgaggtcagcgggcgcctgaccctggccaccagccaccatatcggcctgcaccgcctgccaccggtcctgcgcactttcacgcggcaatacccgaatgtggcgctggatattcagtttctggattcagaagtggcctacgaagaaatcctccacggccgtgcggaagtcgcggtgatcaccctggcgccagagccccacaacctggtgcaagctacccgtgtgtgggacgacccgctggattttgtggtggcgcccgaacacagcctgatcagcaacggctccgtcagcctggccgatatcgccgggcatccggcggtatttcccggcggcaacacctttacccaccatattgtcagccgcctgttcgaggcccagggcctcacacctaatattgcgatgagcactaactacctggaaaccatcaagatgatggtctccatcggcctggcctggagcgtgttgccgcgcaccatgctcgatgatcaggtggcaagtatcgctttgccgggcatacagctcagtcgccagctaggctatatcgtgcacaccgaaaggacgctgtcgaacgctgcgcgggctttcatgagcctgttggatgcacaggtcgatctgccagggttaccggcatgacactgtgtgggccaggggtttaggtcaaaccgcgcggttttctcaatgagccaaggccctttgataatgcgcaaccccgttgacccggttccacccctgccccgcatctacgccctggaccctcaagcggcggaacaaagctgggacagcgccccgcaactgctgacggccctcaatgccgcgcgactgggtgcctggtcctgggaaatcgacacgggaagaatcagctggtcgcggggtacccaggcgttattcggctttgacccgcgccagcctctgcccaaggacctcgactacctcgacctgctggccccacaagacagtgcgcgggtggtgcgcggctttcatgcggtgctcgccggagagccgctcgaccgcgccatgcaccaccgcatccaatggcccgatggcagccagcactggctggaaatcagcggcagcctggttcccgacaaagccggacggcggcgcatgatcggggtgatccgcgagatcacccaccaacgcgaccgtgaacacgccctcagccattcggaaaagcgctttgccaccctgttccacctgtgcccgaacatggtgctgctgacgcgccaggctgacggtttgatcagcgaagccaaccagtatttcgagatgctgttcggttggccggtggccgatgccatcggccgcaccaccctggaactgggcttgtggcgccacccggaacagcgtgcgctgctggtcaaggccacgcagcgcaagggggaacccatcaccatggaagtgcagttctgcgccagcaacggccagatccatgacggcaccctcagcgcgcaaaaggtcgaactggacggcgaggcgtacctgatcagcacgttcctggacaccaccgaacgtaaaaacgccgagcaagcactcaaggacagccaggagcgcctggacctggccctggattccgcgcaactgggcacctgggattggcacatccccagcggcatgctctacggctcagcgcgtgccgcccagttgcacgggctggaacccgcgccgttccatgaatccttcgatgcgttttttgagggcatgtccgatgaagaccgcgagggcatgcgccatgcgtaccgcagtctgcgcgaaggcccggacggcaactatcagttgacctaccgcgtgcaaatggaagacggcagcccgcgctacctggagagccgcgcacgcctgtatcgcgatgaatcaggcaagcccctgcgcatggccggcaccttgctggacatcaccgaccaggtcgagcgcgagcaacggctgaccgcctcggaagagaagttcgccagcctgttccaggccagccccgacccgatctgcgtcacctgcctggagagcggcgcgtttatcgagatcaacccggcgtttacccagacgtttggctttacagccgccgaagtactggacaaaagcgccgaacaaatcggcctgtgggacgactccagcaagcgcctgcagcgcatcgagcaggtgattcgcgaacaggccctgagcaatgtggctatcgtggtgcatcacaaggacggccaaagcctgacctgcatgatttccagccgcttgatcaaggtcagcgaccagccgtgcatcgtcaccacgctgcgcgatattacccagcagcaacgctcggaagccgcactcaaggccagtgaagagaagttcgccaaggcgtttcactccagccccgacgcgatttccatcaccgaacgcgacaccggccgttatgtggaggtcaacgacggcttttgccgcctgaccggttaccgcaccgaagaggccatcggcctgaccctgtaccagatcggcatctgggccgatgaaaaccaacgcgccgcactgttggccgagttgcagatcaagggccgcatccaccacctggaaatgctctggcgcaacaagcgcggcgaggtactggcggtggaggtgtcagtggagccgatcaccttgaatgaaaccccctgtctgctgctgaccgcgcgggatgtaagcctattgaagaacgcccaggcgcagatccgtcacctggcctatcacgacccgctgaccaacctgccgaaccgcgcactgctgatggaccgtctgagccagcagatcgccctgctcaagcgccacaacctgcgcggcgccctgctgtttctggacctggaccacttcaaacacatcaacgactccctcggccaccccgttggcgacaccgtgctgaaaatcgtcaccgcgcgcctggaggccagcgtgcgcatggaggacaccgtggcgcgcctgggcggcgatgagtttgtggtattgctcagcggcctggagggcacccgccagacggtcagcagccaggtgcaagcgctggccgataccctgcgcgaattgctctcggaaccgatgtttctcgacggtcaccggctgcaggtcacgcccagcatcggcgtggcgctgatccccgaccacggcaccacccctgccgatctgctcaagcgcgccgacatcgccctgtaccgcgccaaggactccgggcgcaacaccacgcagatgttccacaacagcatgcaaagaaccgctagcgaacgcctgcgcatggagaccgacttgcgcctggccttgtcacgcggcgaattcagcgtgcattaccagccccaggtggatgcgcgcggcaaccggatagtcggcgccgaggccctggtgcgctggcagcatccacaattgggcgcgcagtcaccgacggaattcatcaaggtattggaagacagcggcctgatcctggaggtcggcacctggattctcgatgaagcctgcggcgcctttgcccagttgattgccgacggcttggtggacccgctcaatttcagcctgtgcgtgaacatcagtccccggcagtttcgccagaacgactttgtggaacgggtggagcacagcctcaagcaacacggtttgccgttcagcctgctgaaactggaaattaccgaaggcatcgtgatccagaacctggacgacacggtggtgaagatgcgccgcctgaaaaaactcggcgtgagctttgcgatggatgatttcggtaccggctattcatccctgacctacctcaagcgcctgccggtggacgcgctgaagattgatcagtcgttcgtgcgcgatgcgacccacgaccccaatgatgcggaaatcatccgcgccattgtggccatggcccgcagcctgaacctggaagtcatcgccgagggggtggaaaccctggagcaactggcgttcctgcaaaagctcggctgccatttattccaggggtatttgcacagccgaccgttgccgatcgaggggttcaggcggctgctggatgcggcatacccagcaggcggctgacttggttcaagtccgtttcccggcgcagggccgtgaacaactccaccgcttgcgggtagttgcgcgtgagcatcgccagccactgtttcaagcggccgggcgcctgcttttccgtgagttgcgccaccgactggcgccagaactcctgaagcatcggctgcatctgcgcccaggtcatctcgaccacgtcttcgccggccttggccgccacaatctgccgcgccaggtcgggccgcgccaccaggccacggcccagcatgatgtcttcggcgccgctgatttcgcggcagcgcttccagtcttcgacgctccagatatcgccattggcaaacaccggcaccttgaccacgtcctgcacccgcgggatccattcccaatgggccggcggtttgtagccatcggccttggtgcgcgcatgcactacgatatgcgccgcgccgccctcggccagggccgtggcgcacaccagcgcgccatccgggctgtcgaagcccaggcgcatcttggcggtcacgggaatatgcgccggtacggcacgacgcacatgctcgacgatctggttgagcagctccggctccttgagcagcaccgcgccacctcgggatttattcacggtcttggccgggcaaccgaagttcaggtcgatgacctcagagcccagctcacaggccagggcggcattttccgccaggcacaccgggtcagaaccgagcaactgcacccgcaacggcacacccgccgccgtgtgggcaccatgcagcagttcaggcgcgagcttgtggaaataggcaggcgtgagcaggcggtcgttgacccggataaattcggtcacgcaccagtcgataccgcccacgtgggtcaacacgtcccgcaggatgttgtcgaccaacccctccatgggcgccaaagcaatttgcatggaaaacactcaacaaaaatcgtggcgcagtttactgggtttccagcggcaaccgttaaccccctgtcagggcggggccgtaaccgtcaataaactcggcgggcatgcgcttgggcttgccgctggacaactcaatgcacacgaaggttgtttgcgcacgcagtagagtcgcgccgtcgcgggggcgtaccagctggaaacgacgggtcattttcagccgttggtcccaatcgacgatccaggtggccagttgtaactcatcgccctcatagcctgccgccaagtagtcgatttcatggcgcaccacggccatggcgcggtccaggcggcggtattcggtgaggtccagccccaggcgctgggaatggcgccaggcgcaacgctccagccacgagacatacaccgcattattggcgtgtcccaggccgtcgatgtcttcagccgcaacctgcagatcgatgatgaacggcgttgccaaatcccagcccatgccttgctccagtcgattgatgtcggcggggcagtgtatcaggcgctctggcgctcctgtagacggcagccggccaatagggcgagtacagcgtcgatcacctgcgggtcggcgagcactttctggtggccgccctgctccaggcgcagcaggcggctgtcgaaccaggcttcgtgaatggcttgagccgccctgaccggaacgaaggtgtcgtcttcggcgtggacgatcaggccgggaatgttcatttggtagtgggccacgtccagatgcttgagcggcatgcccatgctcaactccacttcttggataaaggctgagcgcgcccgtggcggcaagccgaccatgcgggtgaacccgcgcaacacatccagaaagcgcgacggtgcggcaatgctgaccaatgcctgtgtacgcaaccccaactgcaccgccagcatcgcactggcgccgcccatggagtggccgaccaccgcgtacagcggcggcagctcggccgccgcctcaagcatggcgcgggcaaacagcagcacatgggcctcacgccctggcgaacggccgtgggcgggaccgtccagggcaattaccgaatagccgttgtcgaccaacgctgtgatcaaactggcgaactgagtgggccggccttcccagccatgcatcagcagcaccgccgggccatgcccccatcgcaacgccgacaggccgaaacgcagagtgatgcgctccgattgcgccaacaacggcagctcccagtcacgcggcggcagatcgcgcggggtcatgaaggtgcgacgcatcttgctggcaaccgcatgcggcgcaaggcgccccaccgtgccattgaaaccacgaacccaggtcaatgcgcccatcttgcgtcccctttttcagcgtaccgccgacttggccgcacgtatcacgcgatccgataactcgcccggccccagcgcccgcgccagggtcagccccccgaccatcaaggccatgtccgccagggctttgtcgatctcttcagggctgccggccagttgcgcagccatcaactcgacgtgctcgttcaagacctcgcgaaatgcgtccggcaagcgccccatctcccccactgtcgcgggcaacgggcaggcctgggtcgtggagtcgcggtgcttgcgtgacagataaaacgcggcgaccaaggtgcggcgctcttcgccggtcagctgttcgtccaagtcatcgatggaggcgcgacgctgcgccaacaactggttgaacgcttccagcatcagtgcgtctttgctttcaaaatgcgcgtagaagcctcctaccgttagccccgccgcccccatcacttcacccacactgggctcagccgggccacgctggatcaatgccgcgctggcagcctgcaaaatacgttcgcgggtttgcgcttttttatcgctcatcgaagcctccgtcgttcatgggttgaatattattaccataataatatttggcaagcgacaagcacgaccgccggtcagtacagaaaaatgggaataaaggagggaattggccaaacgccagacaaacaaaagggccattcaataattgaatgacccttaaaaatcccgcagagcgggtaatcgtggcgtcccctaggggactcgaacccctgttaccgccgtgaaagggcggtgtcctaggccactagacgaaggggacacaaaccttctatacaactgatcagcgctgagaactgatcgattcaaggacggtgtggccggaaccttgaacctgtaaaattggtggagctaaacgggatcgaaccgttgacctcttgcatgccatgcaagcgctctcccagctgagctatagccccggatttttcgtctcgcgacgcagcagacctttcgagctgcttgttgaaactggcgtcccctaggggactcgaacccctgttaccgccgtgaaagggcggtgtcctaggccactagacgaaggggacaaaaccttctgtacatctgatcagagctgagacctgatcaattcaaggacggtgtggccggaaccttgaacctgtaaattggtggagctaaacgggatcgaaccgttgacctcttgcatgccatgcaagcgctctcccagctgagctatagcccctcatcggtgaggacggggcgaatcttaatggcggtttggaaacgtgtcaaatttattttcaacaatttccaaaattttttgccgggataacaatcacttaccgacgaaaccccggaaaaccggggtttcgtgccgcaagcggcctgcttaagcgatagcggccagcagcttttcccattccttgttttctttcttcgacacaccaccaagcaaatcaagggcttggcgcaggcggaaacgggtcaggtccgggccgaggatttccatcgcatcaagcaccgacaccgaactggcctgcccggtgattgcggcaaacatcagcggcatggcatcgcgcagtttcagttcaagggattccaccaccgcctggatggtcgccgtgattgcatctttctcccactgacgcaggctttcaagcttccacagaatcaactgcatcagttggcgaacctggtcaccggaaagcttcttggactcgaacagcttgggatcaggattcacgccaccggcaaagaagaaattggccaagggtgcgacctggctgaatgtctctaccctgccctgcaccagcggcgcgatcttcatcatgtactcggggttcaacgcccactgctgcacgcggctggcgaactcttgcaccggcaggtcacgcagccactggccgttgagccacgagagtttctcgatatcgaagatcggcccgccgagggagacgcgggacaggtcgaagttgtcgaccatttcctgcagcgagaacttctcgcgctcatccggcatcgaccagcccatgcggcccaggtagttgagcatcgcctcgggcatgaagcccatgcgctcgtagaacgtcaccgacgtggggttcttgcgcttggacagcttgctcttgtccgggttacgcagcagcggcatgtagcacagttgcggttgctcccagccgaagtattcgtacagcagaatgagtttcggtgccgatggcagccactcttcgccacgcagcacatgggtgatgcccatcaggtggtcatcgaccacgttggccaggaagtacgtcggcaagccgtcggtcttcatcagcacctgcatgtccatgcggtcccacgggatctcgacgtcaccgcgcagcatgtccggcaccacgcacacgccttcgcttggcaccttcatacggatgacgtggggctcaccagccgccaggcgcgcagccacttcttccttggacaacagcaacgcacggccatcgtagcgcggggtctcgccacgggcctgttgctcggcgcgcatctggtccagctcttcggcggtgcagaagcacgggaaggcatggcccatatcgaccagttgctgggtgtactgcttgtagatgtcgctgcgctcgctctggcgatacggaccgtgagggccgcccacgtccgggccttcagcccaagtaatgcccaaccagcgcagggcatcgaaaatctgctgttcggactcacgggtggagcgcagttgatcggtgtcttcgatccgcaggatgaactcaccgccatgctgcttggcaaagcagtagttgaacagggcgatgtaagcagtaccgacgtggggatccccagtaggcgatggcgcaatgcgcgtgcggacggtggtcatggcaggtctcgaatgggcgatataactgaaaattgaaacaaggggcgaatggtaacagcctgggtgatttctggaaaaccgaggcgcggccatcgcaggcaagccagctcccacattttgaccgcgctcacagatcaatgtgggagccgggcttgcccgcgatgaggccagcccaatcaacgcaaatcaaacagccaacagccgctcacgcaacttgccaatctcatcgcgcgtctgcgccgccgcttcaaactccagatcccgcgccagctggtacatcttctcttccaactgccgaatccgcttggtgatctcactcggcgagcgcagttcgttctcgtacttggcactttcctcggcagccttggccatacccttgcgcttcttgctgcgcgagccgggcacggtggcgccttccatgatgtcggccacgtccttgaacacgcccttgggggtgatgccgtgctccaggttgaacgcgatctgcttgtcgcgacgacgctgggtctcgccaattgcccgttccatggagccggtgatgcggtcggcatagagaattgcgcggccattgaggttacgcgccgctctgccgatggtctggatcagcgagcgctcggagcgcaggaagccctccttgtctgcgtccaggatcgccaccagcgacacttccggcatgtccaggccttcgcgcagcaggttgatccccaccagcacatcgaaggtgcccaggcgcaggtcgcggatgatttccacgcgttccacggtgtcgatgtccgagtgcaggtaacgcacgcgcacgccgtggtcggccaggtaatcagtcaagtcttcggacatgcgcttggtcagggtggtgaccagcacccgctcttccagggccacgcgcttgttgatctccgagagcaggtcgtcgacctgggtcagcgccgggcgaatttcgatttccgggtccaccagccctgtgggtcgcaccagttgctcgataacgcggcccgcgtgctcggcttcatagttgccgggcgtagcagagacgaagatggtctgcgggctgatggcttcccactcgtcaaagcgcatgggccggttgtccagcgccgacggcaggcggaaaccgtactccaccagggtttccttgcgcgaacggtcgcccttatacatggcgcccacctgcggcacgctgacgtgggattcgtcgatcaccagcaaggcgtccggcggcaggtagtcatagagcgtcggtggcggcgccccggagtcacggcccgacaggtagcgcgagtagttttcgatgccgttgcagtagcccagctccaggatcatctccaggtcgaagcgggtgcgctgttccaggcgctgggcttccaccagcttattgttggagcgcaggtattccaggcgctcggccagctcgaccttgatgccctcgatggcgcccatcagggtttcgcgcggggtcacgtagtggcttttggggtagaaggtgaagcgtggcagcttgcggatcacctcaccggtcaacgggtcgaaggctgacaggctttcgacctcatcatcgaacagttcgatacggatggcttccaggtcggattccgccgggtagatgtcgataacatcgccgcgcacccggaaggtggcgcgggcaaagtccatgtcgttacgggtgtactgcaggctcgccaggcgacgcaacagttcgcgctggtcgagtttgtcgccacggtcgacgtgcaacaccatcttcaaataggtttccgggctgcccaagccatagatgcacgacaccgtggtaacgatgatcgcatccttgcgctccagcagggccttggtggccgagaggcgcatctgctcgatgtggtcgttgatcgacgcatccttctcgataaaggtatcggaggacggcacataggcttcgggctgatagtagtcgtagtaggaaacgaaatactccaccgcgttgttcgggaagaacgccttgaactcgccatagagctgcgccgccagggtcttgttcggcgccagcaccagggttgggcggttggtctgggcgatcacattggcgatgctgaaggtcttgccggaaccggtcaccccaagcagcgtctggtgcgccaggccggcttcgatgccttcgaccatctgacgaatggcttccggttggtcgccggcgggttcaaaacgggtaacgagctggaaatccgacataacgtacctcgtgaagtcaccccagactcgacaccgccagggacgaaatagctcagcaacccgcgaataatcatcgcaggttgcaggaaaaaaccatgatagctgtagaagtggtgtcgaatgtgacgggtttcaaggccgtcgtcctacacgacctttctcgccaatgtggcaataagactaacggtcagcaaataaaccgaaaaacatggccgaaaagccgtttccgttgtcgctctcagccgtgatggcctctatactagctccccgtttgtgcaccgctctagtgcattcggctggagcgcgacacgtccctcctaccccccatagagctgccgcaaaaatgagcctgttctccgctgtcgaaatggcaccacgcgatccaatcctgggcctcaacgaagcattcaacgccgatacacgaaccaccaaggtgaaccttggcgtgggcgtttactgcaacgaggaggggaagattccactcttgcgtgccgttgccgaagcggaagccattcgtgtggcgcaacatgccgcccgtggctacttgccgatcgacggcatcgtggcgtacgaccaggccgtgcaaaagctgctgtttggcgctgagtcgccgctgttgagcgaaggtcgtgtgattaccgcccaggccgtgggcggcacgggcgcgctgaaaatcggcgccgacttcctcaagcaactgctgcccaacgccgtcgtcgccatcagcgacccgagctgggaaaaccaccaggcgctgtttgaaaaagccggtttcccggtacaaacctaccgctactaccacgccgccactcacgacgtgaaccgtgccggcctgctcgaggacctcaacgccctgccgccacagtccatcgtggtgctgcacgcctgctgccataaccccaccggcgtcgacctcagcccggccgactggcaagacgtgctggacgtggtcaaggccaagaacctggtgccgttcctcgacatggcctaccagggcttcggcgacggcatccacgaagacgccgccgcggtgcgcctgttcgcggaatcgggcctgaccttctttgtgtccagctcgttctccaagtcgttctcgctgtatggcgaacgcgtaggcgcgctgtcgatcgtcagcgagtccaaggaagaaagcgcgcgcatcctgtcccaggtcaagcgtgtgatccgcaccaactactccaacccgccgacccacggcgcagccatcgttgccgccgtgttgaacaaccctgagctgcgcgcccagtgggaagccgagctggccgagatgcgcctgcgcattcgcggtatgcgcgagcagatggtggccgaactggctaaggctgcgccaggccatgacttcagcttcgtcggtcgccagcgtgggatgttctcctattccggcctgactgtggaacaagtcacccgcctgcgcaccgagttcggtatctacgcactcgataccgggcgtatctgtgtggcagcgctgaaccaatcgaacattggtgcagtgaccaaggcgattgtccaggtgctgtaaacgggcaaacgttatacgaagggggaagccaatggcttccccctttttattggcgaacacactagactgaacaccgactgcccccttgctgtgagagctttatgagaaacgacgacctggacctgcgcgccgaccgcgacgaattgcacgactacgccccacgcgcaccgcaagccaagcgccagaagagcctggtgctgcaagtggcgttgggagtattcctcggtgggctggcgttatggctggtacaactaggcgcgacggcaatcatggccaaactggccatgggcaccctgcaatttggcggctgatgtaggacacctgtgggagctggcttgcctgcgatagcggcggctcagttaaagattcattgactgacacaccgctatcgctggcacgccagctcccacatttgatctagggtgctggcagagtgcgttcttccagcagttttacgaaactgttcaaactctgcgacaccgtgccccgccgccagatcagccaggtattcaagatacggaacgtgtcgggcagcggccacacactcaccgccgcacaccctggcatactctccagcatactgcgcggcatcagcgccagccctgccccggcgctgacacaggccaacatgccgtggtacgactcgatctcgaagatcctgcccggcaccgcgccatcctgtgagaaccagcgttcgaagtgatgccggtacgagcagttggagcgaaacgtatagatgttctcgccattcacatcctggccacgggtgattggcgcgtgatgcagtggcgcaatcaccaccatctcctcctcgaacaccgccacaccctctagcgtggaatgcagcaccggcccatcgacaaaggccgccgtcagccggcccgacagcacgccttcgatcatggtgcccgaggggcccgtgctcaggtccagctcgaccttggtgtattgctggttatacgccgccagtaacgccggaatacgcacggccgccgtgctctccagcgagcccagggcaaacgcgccctggggctcctcccccgccaccgtggcgcgggcttcttgcaccaaatcaagaatgcgccgtgtatagccgaggaagttccacccggccggcgacaggcgcaggcggcttttctcgcggataaacaattccacgcccaggtcctgctccagttgtttgatgcgcgtggtgaggttcgatggcacgcgatgaatcaactgcgcggcggcgctgatgctgccttgctcggcaacggccttgaagatttccagttgcaccagatccaagtcattctccaatcatgtacatgatcgttcccacgctctgcgtgggaacgctgcctcggacgctccgcgtccaatcgttggctcacagctcgttgacgcggagcgtcaaaggatgcattcccacgcagagcgtggggacgagcttaggccaaatattctcgtaatgagaatatattgcttaatattattcagtttccagaaaacatacagccccgtacgctggccccattccactcattcagccggacggtgccatgaacaatgctatctcccaccagacccacgccctgtcgatcaaccccgccaacggcgaaacagtccgcagctacccctatgaaagcgcagaacagctgaacgccgccctcgcccgctcgaccgatgccttcagaacctggcgccgcacgcccgtgagccagcgcgccgaatacctgctggccctggctgtcgccctgcgtgagcaagctgaagacatggcgcaaatgatcaccctggaaatgggcaaacccatcgcccaggcccgtgccgaaatcgaaaagtgcgcgcaactgagcgagtggtacgccgcccacggcccggccatgcttgctccggaacccactctggtggacaacggcagcgcccgaatcgaataccgcccactgggccctatcctcgcggtgatgccgtggaatttcccggtgtggcaagtgctgcgcggcgccgtgccgaccctgcttgccggcaacacctacgtactcaagcatgcgcccaatgtgatgggcagcgcgtatctgatccagcaggcgctgcgtaaagccggtttcgctgaaggcgtattcgaagtgatcaacgtgacccaggacggtgtatctacggccatcgccgacccgcgcatcgccgctgtgaccctcaccggcagcgtgcgcgctggcatcgccatcggctcacaagccggggccgcgttgaagaaatgcgtgctggaactgggtggctccgacccgtttatcgtactcaacgacgccgacctcgacgccgctgtgcaagccgccgtgatcggccgtttccagaacagcggccaggtctgcgccgccgccaagcgcttgatcatcgaagcgggcgtggttgaagccttcaccgccaagttccttgaagccagccgcgccctggtgatgggcgagcccacctcaaccgccacctatatcggccccatggcgcgctttgatctgcgtgacgaactgcacggccaggtccaggcgaccctggaagaaggcgccacgctgctgctgggtggccataaagttgcgggcgcgggcaattactacgaaccgaccgttctggctgacgtcaccgatcaaatgacgtcgttcaaacaggaactgttcggccccgtggcctcgatcatcaccgctcgcgacgccgagcacgccgtggcgctggccaatgacagcgagtttggcctgaccgcgagcatcttcacccgcgacgcggcaaaggcgcgggcgattgccgatcagttggaaaccggcggggtctttgtcaacgcgttcagcgtgtcagacccgcgggtggcgtttggtggtgtgaagaagagcgggttcggccgcgagctgtcgcacttcggtgtacgcgagttctgcaacgcacaaacggtgtggctggaccgcaagtaaagctgcaacggctaggcgtcgtcggtgcgcgcatcgaacgccgcctgcgcctgcagcaccgcttccgaatggctgagcgtccaggcgtaaagcgccttgaacggctcttccagcgtcccccccagcggcgtaatgctgtactccaccgccacctgtgaagacgggatgacccggcgcgccaggatgccactgcgttcaagacggcgcaggctctgggtcagggctttttgcgtgatgccgtccaggcgacgcctgatttcattgaaacgcagcggtttttcgcacaaagagcccagtatcagcaccgaccacttgtcggtgatctgatcaagcaataatcggctggagcaatcggctttgaataccttgggcaccgtaccgtcttgagtcagcgccgggtcatgatcgagcatgtggtttcctctgggatacctgatagctttaaagtgcctaattgatattaggtatacacaatatactatcaagactcatttcaaatggagtctctggcaatgagtgttacgaatctggatgctttgtttcagccatttgcgctgaaatccctggccctgaaaaatcgcatcgtcatggcacccatgacccgttcgttttcccccaccggtgtaccggaagaaaacgtcgccgcctattatcgccgacgtgccgaacacgacgtcgggctgattctctcagaaggcaccgccattgatcgccccggcgcacgtaacgaccccggcgtcccgctgttccatggcgaccaggcattggcgggctggaaacaggtcatcgacggcgtgcatgcggcaggcggcaaaatgggaccgcaaatctggcatgtcggatcagtgggcaatcccttcaacgattgggcgcccgagaccggtatcgaaggcccttccggcctcgccgcacccagtacgccacgcggtgacgcgatgagtgatgaagccatcgccgacacgattgcggcttacgccaaggcggctgccgactccaaacggttagggtttgataccgttgagatacacggtgcacacggttacttactcgatcagttcttctgggaaggcaccaatcagcgtcccgaccagttcaatggtgcatcgatcaaggaacgctcgcgtttcgcggcagaggtggtcaaggcgatacgtgcagcagtaggcccggcgttccccgtgatattgcgggtgagccagtggaagcagcaggattacagcgcgcgcctggtgaccacgccgaacgccatgtcggactggctggtgccgctggtggaagcgggtgtcgatatcctgcattgctcacaacggcgtttctgggaagccgaatttcccgaactggatggcgagcaggggctgaacttcgccggctgggccaagaaactcaccggcgcggcgaccatcagcgtgggctcggtcggcctgtccggggactttcttgccgccttcggaggcgaaagctctcaacccgccagcctggataatctagtgcacaggcttgaacgcgaagaatttgacctcatcgccgttggccgcgcattactgagcgacccacagtgggccagcaaaattcgcacgggagagacctccagcctgaaagccttcagcccatcggatcttgctgagctcatctagccaataggcccaagtcagccccgactatgccgtcgcacgcactgcaccaacccgtccagtgccgggggattcaccggcgcgagcacacagaccgtgtgctcgcgcttgccttccgcaactgtcagggtgtaatgcacccggcctgggttgccaggctcgggatcggtgctttgcggcaactggaaaaaacccgacgcttcaatcagttgccgcaactcctgctgatcaggctcgggcagcgcgtccaactctaccgtgcgcggcttggccaaccccggaaaaaacgccggtccgccgctttccttgattgaaattcgcatggtttttcctcgccgctcaggcggcttcgtcaaacgtttatgcccaccgctttccagccttccttgactgccttctgctcagctttgttcacgccataaagctggccggcaatatcgtgggtaatgcgcgcaaaacgcaagaacccggaattgggccgcaaccgcgaatcgcgcagtgcgtcataccagatacgcccggcacgctcccaggcgaacccgccaatccgggtggccacctgatagaacgcgtggttgggaatgccggaattgatatgcaccccaccattgtcctcgtaagtttgcacaaaatcatccatgtgcccaggctgcgggtctttgcccagcagcttgtcatcaaacgcagtgcctggcgccttcatcgagcgcagcgccgtgcccttgatttttttggtaaacagccccttgccgatcaaccagtcggcatcctcggccgtttgctttaacgcgtactgcttgatcagcgaaccgaacacatccgacaacgactcgttcagcgcaccggactggttgaagtacatcagcttggcctcatcctcagtcacgccatgggccaactcatggccaatgacgtcgagtgccacggtaaagcggttgaacaactgctggtcgccatcgccgaacaccatctgggtcgaattccagaacgcattgttgtagtcctggccgaagtgcaccgtggcgtccagcgccatgcccgcatcgtcgatggaattgcgatcaaagacctggtcaaaaaaatcgaaggtcgcgcccaggccgtcataggcttcgtccaccgcggcatcgccactggcgggctgcccttcgccgcggatcagcttgccgggcaggctgtcggtgttttcggcactgtagatcgagcgttgcttctcggcgcccacggccagtgccatgcgggccggccccttggcgggtaccgcgaccatgcgcaacgaacgaaacgtgctgtccttggcacgcgtgcgtaatgcgacttcccgttgggctttgtcgccgtggcgtgcgatctggtcgagcatgtacggcgggatcaggcaaaaaatcgggttgcgcggttggcgaacacacatgagctggctcctttttggcgtgtggtgaacgtccgggtaacggttttcaggatagccctgtgttcgccccctgggccaaattgtcatgagtttgtgtttcagtggtgtttatccgaggcccataaggaacatgcccatgcccgcccgcacagccaacatcgacctttcccaccgcccaaggctcgccgacctgcgcccattggtcgcgctcagccccaccctgctggaagccagagccgcgacgccgcgtgtcacctccgccaaggacctcaaaaaccgcactggctatgccgacgatttcctcagcgacttcgtggtgccatggcccacggttgaccagccactggcgggcgacgtgcaacccaagcgtctggactacacgcatttctccatcaccctgtcgcgctctcgacgactggcgctctacgtgggggtgaatatcgacggcgccaagcatgtagacatcacgcgcagcaacgacacctgggcctacgatggccgcctgcccctggatgcgcaggtaggtgaagacctctatgccggcaatggcctggaccgcggccacctggtacggcgccaggaccccaactggggcgacgaggccaacaccgccaacttcgacacctttcacttcaccaactgctcccctcaaatgagcggcttcaaccagaagacctggctggaactggaagactacatcctcgacaacacccagcgctggaaagcccgggccacggtgttcagcggcccggtgttcagcgacaacgatcgcgtttatcgcggggtaaaaatcccccaggcattctggaaagtggtggcctacctcagcgacgacggcaaaccgtccgccagtgcctacatgatcgaccagcgacgcgagctggatcagttggacctggtgttcggtcagctcagaacctaccagcgcagcgtgatcgcgatcgaacaattgaccggcatccgcttcgccaacctggccgactacgacggcttcagcaacgaagagcgcgccacaggtacccggatcgaagcgctgatccgcggcccccaggatattcggctctgacgatccctttgtaggagcgagcttgctcgcgaagcacccgagagcaccgcggcgcaccaggctccccgcgttaacgttagcgaccttcgcgagcaagctcgctcctacagggtgtgatcgcttaccatacggccgccggttcccgtatgggactaacagggaattcgaaacgccgcacgcggcgtgaaccgaaactgcccccgcaactgtagatgccgagcctgccctcgaatgccactggaccacgtccgggaaggcggggcatggcgacgacgcatcagtcaggagacctgccggcccagctaattcactaaccggcggggtgtccgggaaggacatcctggccctgcgcttcagcagcctccatgggcgtatttccgagccgtacctcccctgctgcacctacggttcacaaggagatcgcctcatgctgccacgcgttaccgccctgatcgcaggtttgagtgtgtgtgccctggcgcaagccgcgcccactcagtacccgctgaccctgcaaaactgcggcagcaccctgaccttccagcacgcccccgcccgcagcgtcaccatcggccaggccgccaccgagatgctctacgccctgggcgtgggcgacaaggtggtcggcacttcgctgtggttcaacaacgtggcggcgcagtacaaggcccaggacgatcgcatcgagcgcctggccaacaacgagcccagcttcgaagccgtactcgccaagcgcccgcaactggtggccgccgagctggaatgggtggtgggcccccaaggcgtggtcggcacccgtgagcagtttcatgaactgaagatccccacctacctgttgccgtccgactgcgaaggcaaggacaacctggtgggtgccgacggcacgcgattggagccctttcgcatcgagacgatctaccagagcctccagcaactggcgcagattttcgacgtgcaggatcgcggccaacaactgaccgacgaactcaaggcgcgcctggccaagtccgtcgccacggcccagggcaagggcttgcagcaagccagtgcactggtgtggttctccagcgccgaaatggccagcgacccttacgtagccggccacaaaggcgtgccgcaattcatgctgcaaacccttggcctgcgtaacgtggtgcagtccgatgaggagtggcctgccgtcggctgggaaaccatcgccaaggccaaccccaccttcctggtgatcgcacgcatggaccgccgccgctacccggccgacgaccatgaaaagaaactcgccttcctgcgcagtgacccggtaacccgcaacatggacgcggtgaagaacaaccgcatcatcatcctcgacgcccttgccttgcaggcgagcctgcgcaccttcgagggccttgaacaattggccgccgccatcgacggctaccacctgggcaaatgatgcgcaccctactcgccctggcgctgctgttgctcgccctgctcgctggcgtcgccatcggtgaaaccgccatcgaaccgcaggtggtgctgcaggtgctcgccaataaactctgggccgccggctacgtactggaccccatcgacgaaggtgtggtgtggaactaccgcctcacccgcgccctggtggccgcagcctgcggcgcagggttggcaacgtgcggcgtgatcctgcaatcactgctgcgtaacccgctggccgacccgtacctgctgggcatcagcgccggcgcgtcaaccggcgcagtgctcgtcgccttgatcggcgtgggcggtggcttggtgtcgttgtcggcgggcgcgtttgtgggggcgatggcggcatttgcgctggtgacgctgctggcgcgggccagcggatcgtccagcggtaccgggcagatcatcctcgcgggcatcgccggctcgcagttgtttaatgccctgaccgcgttcctgatcaccaagtcggccagctccgaacaagcccgcggcattatgttctggctgctgggaaacctcagcggcgtgcgctggccgtcggtgtggttggcggtgccggtggcggtcgtggggctcgcagtgtgcctgtggcaccggcgtgcactggatgcgttcaccttcggcagcgactcggcggcctccctcggcatcccggtgcgccgcgtgcaatttgtgctggtggcctgcgccgcgctggtgacggcggtgatggtgtccatcgtcggctccatcgggtttgtcggcttggtaattccccatgcggtgcgcctgttgcttggcaccgggcattcgcgcttgctgccggccagcgccttgggcggcgcgctgtttctgatcgccgccgatgtgctgtcacgcaccctgatcaagggccaagtgattcccgttggggtggtcacggcactggtgggcgcgccggtgtttgcgttgattttgattggccggaggaacgcccgatgagcgtgctcagttgcagcggcctgggtttcaaggtgcgtgaggcccagttactggacggtatcgacctggacgtgcaggcgggcgaaaccctgggcatcgtcgggccgaacggttcgggcaagtccaccctgctcaaattactcgccggtttgcgcccgccggccagcggtgaagtgcgcctgggcggcaagcgggtcggtgggttgtcacgccgcaccatcgcgcaacagctggcggtggtggagcaacaggccgacaccgacgacgccatccgcgtgttcgacgccgtggcgctaggccgcacgccctggctgtcggcgctgagcccgtggtcgcgtgaagacgacgccatcgtgcaccaggcgctgcacgacgtagacgccacccacctgagccaacgcgcctggcgcagcctctctggcggcgaacgccaacgcgtgcacatcgcccgcgccctggcgcagcgcccgcagattttgttgctggacgagccgaccaatcacctggatatccagcatcaactggcgatcttgaaaggcgtgcaaggcttgccggtgaccaccttgattgcgctgcatgatctgaatcaggcgctgacctgtgatcgcctggccgtgctggatcgcgggcggctggtggcgctgggtacgccgcttgaggtgctgacgccgcagcgtttgcaggagacattcggagtgcaggggcattacctgacggacccgttcgacggcgcgcaaatcctgcgcctgcgctccaactgaatccgtacgttggggcagcttgctctggtgacggtctgactgccaactgtgatccaaatgtgggagggggcttgcccccgatgagcataggtatctacagaacttcggtacgacgctaaacctgtggcgagggagcttgctcccgcgacggcctggcagccgacgctgatctaactgacgcaccgcgatccaactgtgggagctggcttgcctgcgaagacggtttgacagtcaacacagttggaccgtgtacatatccattcctgcggtaacggccactgggggcaagccccctcccacattggttctacagaggcaggtgcatgtgggtggtttgccatatcgggtcggcctcgacatccaccacctcaaacccctgcctgcgccagaaatcaatcgcaccgggcagaaacggatgggtatgcaagtacatcatctctacgccatcggcccgcgccagcgcttgcagcgagcggtataaccggcccgccaggcccaagcgtcgtgctgccgggagcacatacaggcgcaccacttccaccgtgttgcggccctggtagttcaactgggggaaacggccgtcgtagggccgataagccacggaggcaacgatccggccttcagcacgagcaatcaaaaatcgcccgctgccctcaaggtagagggcttcaaactgcgccagatcctggggtactccggtggcactgagcgtgggaaacagttcatcacgcgcctgcaaagcgaagctcagcacctgggaaatgtcagcggcctgcaccgcctcgatactaacgctcattgccaaggatccggcccgttatccactggcgagcgtaagccaacacgcgatcagccatcgccaccggaaagtgaataaacccatgggccgcttccggcaagagatgggcctccaccgccgcccatcgctcggcaatcagcagagtgtcatccttgagcgggtccagttcacccacaaacatcaacgcgggcggcagcccttcaaagtccccatacaagggcgacaacggtggctgacggcgcgtctcgtcgctgatccccggcgtcagcaggcgcagcgcctggaccatgcccggcccgtccaacaacagcgtgtcccgcccggccgtgcgcacgctgggggtgccggtcaaatcgtagacgccgtaatacaacaccgcgccgctgacccgctggagtaactcgggccattgcttgagcgccaacaaagtggccgccgccaggtgcccgccggccgactcaccgacaaaaaacaccggcaggccggcaaactccgggcagtccgccaacagccagcgcgcagccgtcaggcagtcatccagcagcccttcaattggcgtatccaccgccagccgataatccaccgacaccaccgccacatcgcacgcgttgaccatgccaaggttaaggtcgtcatccatttgcgcattgccgatcacccagccaccgccgtggatatccagcaccacgcctttgggcttgccactggggcgcaagatgcgcacgggcaccgtgcccagccttttcagctcaaccacgggcgccttcttgaacgtctggctagcgcgtagcagtgcctggatcagacgcggtgtcacgcggttgcggactttaaagcgcggcatccacgccagtttctgattgaagcggcgcatctgggccagttcgggctcgctggcgggccaatgctggtaggccatcagcgattattacgcaggatcgagaagttcaacgccgcggccacgcacagccacgccagatacgggaacaggatcaggccggtgatcaaatccaggcgcacggccagcactaccatggcggctacggtgagccacaagagcacgataatcaccatccccgcgaacaagcgatgggcaccaaagaacaccggcgtccacagcgtgttcaacgcgatctgcgccgcccacagggccaacaccatttcgctgccggggatcaaggtcaagcggtaaccggcccaggccaacagcaggtaaatgatcgtccatgccaccgggaacagccaattaggcggggtaaagctgggcttgaccagggattcgtaccaggcgccgggtttgaagatcacgccagtgctggcggcggcggcgcaggcgagcaggaagatgaaaaaggtcatggtcggtccttgaggtcctgtggatggaaaaacaatgcactgctttgagtgactcaagcaacctcggataaattcaatgggagcagcaaaatacccgctcttctgcgcgtcatgaaaattggttatggtcggcaacatccagcatcgctgcccgagacgtccccttgccccagcttgccgatcaccgcagcagcccctggtcagtgttcctgatcttcctgcgcctgggcctcacttccttcggcgggccgattgcgcacctcggctattttcgccaagagttcgtcacccgccgccgctggctcagcgagcgcagctatgccgaactggtcgcgctgtgccagttcctcccaggcccggccagcagccaggtcggtatcgcgttgggcctgtcccaagcaggttaccggggcgcggcggcagcctgggccgggttcaccttgccatcggccatcgtcctgatcctgtttgccctggggctggcccactacggcggcgccctcccccatggcgcgctgcacggcctcaaggtcgtcgccgtagccgtggtggcccaggctgtgtggggcatggcacgcaacctgtgccgaggcgttttacgggtggcgttgatgttgatcgccgcctgcgtggtgttgctgcaaccctccgcttgggctcaagtcggggtcatggtggtcgcaggcgtggccggcctgttgctgttcaagcccgagagcagtgccgagcccgacgccctgcccattgccatcagccgccgcgccggggccctatggttgatgctgtttttgctgttgctggtggccttgccgctcctcgccgcatgggcgcttaaccccacactggcgctggtagacgccttctaccgcaccggcgcgctggtattcggcggcggccacgtggtattgccgctactgcaagccgaagtggtgcccagccaatgggtcagcaacgatgttttcctcgccggctacggcgccacccaggccgtgcccggcccgctgttcaccttcgccgccttcctcggcgcctccatgacccacgccccgagcggttggcttggcggggtgatcgcgctgctggcgatcttcgccccgtcgtttctgctgatcttcggtgccttgcccttctgggccaacctgcgcaaaagcccgcgcacccaagccgcgctcgccggggtgaacgcggcggtggttggcctgttgttggcggcgctgtaccagccggtgtggaccagtgcgattttcaacggctacgacctcgccctggcgttgctggcactggccgtgttgatggtgtggaaactgccgccatggctggtagtgataagttgcggcctactcggcacgttactgtaggagcgagcttgctcgcgaaaaactcacaggcgccgcgttcaatctgaaggcacgcgttatcgttaacgattttcgcgagcaagctcgctcctacagcattggggctcagcccggctcgacaatcttgagccacggccaacgcgcctgataactcctggccttgtgcaaaaacagctcaggctccggatgcaaagggttgatgcgcaagacaccctgctccacatcctccaggccataaggcgcatacacctcgcccgaggcaatatccagcgcaatgcacgtgcccgccaccaggtaacggtcaaccccctgccgagccgaatgcaactgcggataaggccggccaaaccgctgcccataccaaaggtgcacccgcgcctgattcttgacctctacattcacgcccaggtcctcaaatagcgcctgtgctcggcgaatcaccgcgtcctccgcctcgtacgaaacatcctcatcaaagtaaaaaacgtcgtaatccttcacgccctgatcggccggcagattcgcctgatgattccacaccgcctggaacaggcagcccgccgtgagcaggcactgctgcacacccagatccggcaggcgcgccgtgatttgggcattgatcgggttggccatggccaattcgagcaaggtgtcgacagtcaatgtcatgttcagtcctccatagcctgccgcaaccataacacccgaatatggcactcctgtaggagcgagctcgttcgcgaaaatcctaaacgatcacgcaacgcctgaaggcaaaacccaatcccccccgccacaccttgctccattgcctacgcctgcatctgccgccgtgcgccaatcctgcttatccctacctttagtcggatatctctgagggttctgacgcaacggctagccttcagcttagcgtcagggattacgctgaacattcggtccatgaagggccagtccgcctcatcgtcccgacgcgttatctgctgaggagacgataatgaaaataaccctgaaacagttggcgtgcctgggtgcaagcttcaccagcgcgctcgccatggccgatacggccaccccgccggtactgtcacctgcgatccccttcgacgtcaccgccaaccctcccatcaccctggacagcctgcaacacgatttcgacgtgctgtcgtggcagaccttcgtcgccctgaactggcccgccaacgccgacggcagcgccaacacctcggcgcagatcggcgcgccggggcagacggtttgggagtcgtggaaagagagctacgcgattttcctgccccaaggccagaagccggtcgcctgggaccagcacacgccgccacccgccgcctgccaaggcaaggggaacctgcccgtgctgcaacagatgggcaaggtcgccggtgtgctcgacgaattcatccagccgttcaagaccggcccgctggtggaccagaacggcacctacacgcgcaacgcgatcatggtcaaccagccgatgttcaacgacatcgtcaacaatggcctctacagcaaggaaggccagcaggctttcttcaccaaggccgacagccgcatcgccttctcctgcggcgtgaaggaggataagcaggtcggcgcgatcatggtcaagtcggcctggaaggtactcggcagcaacgacaacccgcaggaattccacgccgtcgacgcgttggtttacacccccggcaacaccgacccgaacacgggcgcggtgatccccgagtcgtgcagcgcgcagcaggtcgggctggtcggcctgcacatcgtgcacaagaccaaagaggcgccgcagtgggtatggtccagcttcgagcacgtgcgcaacgtgccggaagagaccacaccgatgaacgagcgcaagggcccctacctgttctacaacgcccaggccagcaacctccccgtgaacgagccacccgcgcaaccgtgggacccgtcgaagaaggccacgccctcgcagatcgtacgggaaatcccgctcactgccgcgacccaccagctcaacgcgcagtggcaaggcgcgctcaagggcacggtgtgggccaactaccaactgatcagcacccaatggccaaccgcccccgccgatgactgcaaggtgccgtcgccaaccaacccgctgggcacgcctgccccgaccttcctggccaacgccacgctggaaacctacaaccagggcaccacgccacaggcctcgtccagttgcatggagtgccacaacaacgcgaccacccgggtgacccagtccccgcgcaccagtttcgccgatttcaccttcctgcttgaacgtgcccaatccaccggtgccaaggagtgatgccatgagcgacccaaacctgcaaaacttcatcgacctgtccgccgtgctcactggcctgtcagccaaactgctggcgcctttgctcgacccggtcaacctgccgccgctgttcttggccactgccgagcaaggcatgggcaccgctgcgttcagcaacctgctgacgctattcgcccgcatcaaaaaccaaccgcctgagcaaatcgccagcgccgtgctcggcaactctgacccgcagatcgcccagggcgcgcgctcgatcatgaagctgtggctgcttggtagctggtaccagccttatgaccagggcaccgcccacaagggtgacatccgcgtggtctccgaccaggcctacaaggaaagctgggcgtggaagatcgcccagtcccaccctatgggctacagccaataccacttcggctactgggccgagcagccaccgaccctcaagcaattcaccggtgtcgacgccaaggaagggcagcaaccatgagcactctacacacccagaacatcgaaaccgccgatgtaatcgtcgtgggcgccggcatggccggcagcgtcatggcctatcagttgggcctggctggcttgaaagtgctggtgctcgagtcgggcccggccataccgcccaaccgcagcgagtacctggagcgtttctacacggccgtgctcaaggcgcccgagtcgccctacccaccggagcagaccgagcagaccccggccaaacagttcgccccgcgagcgactatccaagacttgatcaccgccggcagcgacgatccgaacaagctgcagaagagctacctggtacaaaagggcaagcaactgttcgccagcacctacgagcgggtaggcggcggtaccatgtggcactggatgggcacggccctgcgcctgttgcccaacgactttcgcatgcagagcgtgtacaaggtcggggtcgactggccgatcagctacgacgacctgcaaaccgcctactgccgcgccgaggaagagatgggcgtttccgccgatgtggcgtcgcagagctacctgggcgtgaccttcccgcagggctatcaatacagcatgcacggcatcccgccgtcgttggtcgaccagggcgtgggcaaagccgtcgatggcacgcagtaccagggcgtcaccctaaaagtgcggcaaactccagccgggcgtaactcgcagaacgacaacggtcgccgggtgtgcgccggcaacaccagctgcacgccgatctgcccgatccaggccaagtacgacgccaccgtgaccatggccaaggcgctggataccggcaacgtgcgcatcctctaccaatgcgtggcgagccaggtgcaggtcgatgacaataatggggtcacgggtatcgatttcatccagtaccagaacaacggcacccgccagaacggcaaggcccagggcaagcgctacgtgatcgccgcccatgcgatcgaaacgccgaagcttctgctcaactcggccagcccggacagacccaacggcgtggccaacagcagcggccaggtcggcaagtcgttggccgaccacccggtgtacctggcctggggcctgatgcccgaaggcaagccgctgttcccgttccgtgggccgttgtccacctcggggatcgaagacatgcgcgatggcccgttccgcagccagcgtgccgcctggcgtatcgagatcggcaacgagggctggaattggtcggcgaatgatccgtacgccacggtctgcgatttcatcgacggcaccaacgaaggcggcgccaaccctgataaaaagacgttgtccggcgtggagctggtgcgccagctcaacagcgtgctgacccgccagttccgtctggccttcttgatcgagcaggtcgagaaagaccccgacaaagcgctgtgccgggtagagagagccaaggggttcaccgacggcttgggcctgaccaggccgcagatcgcctacgaactgtccgactacaccaaggagggcttcaagcaggcacgcctggccgccacgcatatcatcaccaagctgatgggcgccaccgaactgaccaacctgaaccccaagctcgacccaaagctcggcgcacaaacggtgttcgaatacgaccaccagaactacgcgttctacggcgctggccacctgatgggcacctaccgcatgggctcggaccgcagatattcggtggtggacaaggaccagcgcagttgggaccaccccaacctgttcctggtcggcgacggcgtgttcccctccaccggcaccgccaacccgaccttgaccatcaccgcgctgaccttccaggccgccgacgtggtcgccagcgatctgctcaagcgtaccgtgcaggtgcaggccaaccaggcctggcagggcaccggcgtgcaggtcaacgggcatagctggcaaatggcggtgtgcaccggtgggcagtggacggccaacccgggcaccggcatggtcggcgcggcgggcaacccaggcttgaccgccaagcccggctataccttgcccggtcaagcggaaggcgcgttgatcggccgtatcggcaccagcggcgcgccgttcctggtgggcaaccaggcgcaattgccgcgtggccagcagggggagttgcaattgtgcatcaatgacgacctgaccgggcgttacggggctggcctgagcgataaccagggcagcctgtcggtggaggtgcgtttcggggcggtgtaggcgctgtcatagcaaccccacagtgctgcggcgaggctgcagtgttgtggggttgctctctcaatcccgtcacttacaagctatcggccacgcctaacgcagtgagccattgccgctggttgtgacaggctgaaaccggccaatagctgcccgcctcagaaacctccaagccgcatgatatgagtcgcctgagcctcatctgttcgcatgaagccacagcgctcataaaaggcgcttccttcagccgtatccgtgaaaagacgcacgacctgaaacctgagagcggcacgttcaacaagcgcctttaccagcgcctgcccgacgtgttgcccccttgacgaagctgcgacatacacccgtcgcagtctggccacattattgtcagcatagggatcaactgaaagaccgccgatgcctatcagttgctggttcaaataggccgccatcagacactcgccgggtgcatcaaagcgatttgctccagagtgccattcgttaatcagacggctgaggaacctgaaaccttcgccaacggcttccttttccagcgcctgtatctggcgcggaaggtgtgtgatcggttgaacctcatatcgtttcatccatccctgcctccaatatgaaactcgttcaatgctaacaatttcgtttgaggtgatgaacactgcaaggtcactcctgtaggagcgagcttgctcgcgaaaaacccaaacgatcacgcagcgcctgaaggcaaaatccgattcccctgccgcaccttgctacattgcctacgcctgcgtcagaatccgccggcttgtgcgctggggtagccgtctctaaggtggctcgatcactgaattgttcagtgatcgggtttagtagcctgagggtttatccaaacaatgtgcacaagtttcatcgatcagacattgcgtctgtgtttgatggtggctgtgcgcagggcaccttcgggtgcgccggctttgtttggattccccggtctactaacctgcgcacagccgccacccttatgtttagtagctaaaggatggtggccctaaacaggaattcaaacatgctcaaatcagattcaaccacgctcttcaccattgcccccaacgccagcaacgaaaccctcatcaccaacagctatgaaaccttcaccagcgtcagcaccctgctgctcgacctgtccgaagacctcaacggcaaacaccgcgacatcgccctcgccatccaccaactgagcgaactgggcgtactcctcaccgccagactccttgaccgcgaagcgccctgccctggctgatgatcagctcttcaactcattagcccgatgactcgccgcgtcgttgtagaccacatacaacgactcggcgagttggcgcttgatggctttggtggattcagcctcggcacaaagccatctgcgatgacgagagcggcgactgctttcggcccagagtgtgtaaatacttagcagaaacgtgtggcactgaggtaaagctagtctgtagggctcaaaccgaagggatgccgtcgaatgacgggatattctagaaccagtgtgcgtgcattttcgaaagaaattcaggggtaatcggcagactggatgctgaaccgatgaccgagtcgatcccgcacttcggacacagagcggtgctatctagatcaacccactcagtgatttctgagggcgaaaacacacctaagcagtaaaaacagccacagtgatcgcttccttcaatttgagtacggtgatttgtagaaaataggtgcgctgaaatcacatccatgggcaggtccttaagctccaaatttactagcattactttcttgcatcagagtacatcaagagtcttccaacgttgctacgattgcccaaagtgataacggaggattgcctatgaaacgtttcatccaaggtgactatcgcggacaaagcaccctgcttcccgaagccttgacgactacgtcagtgataccaatccggttcgcgtagtcgacgtctttgtcgacgaactcgacttagtcaatttggggtttgatagcgctattcctgctgatacaggccgacctggttatcaccctgcgatcctgctgaagatctacatctacggctatctcaaccgaattcagtcgagccggcgcttggagcgagaagcccagcgtaacgttgaattgatgtggctgaccgggcgtttgattccaatcgaaaaggggacggatttattttcctagaaataaatccgtccccttttccactcttttagacaagcagaaacaagtattcagcttactgtctgtgaagtgcaacccgcggcagtcggccgctgaggcgcaggccgtcacgcatattcaaccccattaatgcgagattggtggcccctgcgatcagttcgattacctgtacgaggtaaaaacgcgtatcgaagcttcccgccgacgcccattggttaagcacaatggcgcacggcatcagaaccagcaggccattggcggcaatgaatggcatacgtttcttcttcaaagcgaccagtcgtccttgtcgtttccgactcattagcactccacttgcaccggtcgcaatcattgtcggtaccagtatccaaagcccgggactcacgatcaggtgcttgagtgaggctatcgaatgtccggatccgatgagctcgacaaaaatagtcgacagaaagaaggtggcgatgcagatcagtgccagcgtgctggagatcagatgtaatcgtctaagcatttatctaataccgtcagacagttggttaatactcaggccgtgcagatattcgacaccgctaccttggtgaacagatgcggcatggccaaggcacttgagggataccgcgccaaggcattggtgaattctggatgattgaaagcatcgcgaaaccgctctaccgattcccatacggcgtaattcaagaacatgttgctgccaccgatggcctgatggagctgcgtggagatgaaaccggcacgttgtttcatccagttggcatccagctcccatgcgcaaaggaggtcaggtatatcgtctgcgtcgacagtgaagaggttgatcaataccactggagcttcgctgcaatgcagctgctgagtgatgggcacgatcggatcaagggggcgaatagaaagcatggcgacctctatattgtaatcatgatgacaatttggttttcaagttccaaacctactgcgattgacatcatggtgtcaacgtggaaggattcgcgccatgaaaaagacaaactacacccccccaggacgcgccatgagcgatctggttcttgagatctttcgagcaagtgcgcgtctgcttactgcaggcgatcgactcgtcgcagagctaggtctgacaagcgcccgctggcaactactgggtactattgtgtacgccgaacgagcacaaccggtttcatggattgctcgcgacatgggggcaaatcggcaaaacgttcagcggatcgttaacgatctggtgaaggatggactgctggagtttcagccgaacccacaccaccgcagggcgcagttggttgtcctgactgacgctggaagagaagcattcgatctggcgatgaatcttcagacgccctggattaatgagctggcggaggggttggacatcgatgctatccagactacccatcaggttctaaaccacctgcgcaataggcttgaggaagaccaggccgactgacccggccagccccggcataatcgagcttgtcaaaagctcaggcaacaaaagaccggatcagcttgtaaacggtgctcacggacgtccgcttctggtcgatatcagccggtcacgaggggcagccctcggccaaagacaggcatccggacaacctgattcccagggttaaacccccggtatctgatacacaaccgaatcatatttctccgccgcccgcctctcgataacaactccccccaaagcttcggcaatacgtcgactcgcacgattctgcgtcgcaacagggtagataaagtactttgccaccacccactggctagcccactgaacaaccgcccgcaccgcttcaccaccaaaccccaacccatgtttatcttcacggatccagatacccaattccggtgtttcgctgccggtatggtgcagcccgaccaggccggtaaaacgggcattcacccgctctctgatcgtaaacacaatgtcgctgccatccgctatcgcaggcagccaccgcccccaaacgtgtgcgtactcttccagcgaggcaggcggttcccaggacatatagcgagtcagagacggtgtgatacaagggaaagagtcaacagcgtcctgctcacagaagggctcaatgctcaggcgttgcgagagaatgcggattgcgtgggtgtccactggcattgcaatttccttcctgggggccgttactccatgtatgccgtgaacataccatgcaggtcgcctcatcagtatcaggctctctatactggggccccaggatggtagttggagcacacaatatgcccgtcgcacccaatcaaaattccccgatcattttggtcccagttcaacaaagcgacttggataatctggtagccattcgaattgaggccatgcgcgaaagtctggagcgtgttgggcgatttgacccagtgcgtgcgcgggagcggtttcttggcggctttgaagctcgcaatacacgctatatcgaggcagctggagagcgggtaggtttcgtagtggtcaaacatcaccccaatgagctcttgctcgaccacttgtatgtaaggccgagcgcgcaagggtcaggggtagggtctgccgttctcgctcaggttttcaaagaggcggatgcggctgcgcttcctttaaaagtgggtgctctcaaagaaagcgcttcgaatcgcttttatacccgccatggcttccagttcatcgaaagcagtgagttcgacaattattatgttcgtcagcctattccggcgattggccctcattccggaaccatggactgacttgcactagcccctcagttcacccgcccgattgctcgccgcgtcgtcatacgccacgtacagcgactctgcaatttggcttttgatcgccttggtggcctccagccccagcacaaaaccctcggctttaccgccagcgcggttaagttcttcatgggtggaggcgccagtaatagcgtcaagcagcttggcggcgtgggggccgacgcctttggggagggagatctggtcgatggacattatcgctaccttgaaaaatggagttcgggagcgagtggaaccactgccggggctggcatggtagacctgtttgccatgaaaggggtcgctttacgcgcagcggcgctattctttgcggctatgcagtcagattggggaattgataaatctggaggggtttatggagtattgcgttgagggctactgccttcggccattgtgcagcgatgatttcgagaaggtcagccgttacgaacgcgtcaaccgcaggcatctgcaaccctgggagccgctcagggacgaggaatacttcaccactggcaacgccaaggccagggtggagcagcaggtaaacaatatgcacgctggtaacgctctgtgtttcctcttgcttgaacccaagagcggagaggttctagcgcggtgtaactacacgaacattgtgaggggcgtttttcaggcctgtcatctcggcttctcgttggcggaatctgcccaaggccgtggcctgatgaaaaaaacacttcaggtcactaaccgtcattgctttgagcagttgggtcttcaccggatcatggccaatcatttaccccgcaatgtgcgaagtgagcgccttctggagtcgctggggtttgaaaaggaaggttatgcgcgagcctatctgaagattgctggcgtttgggaggatcatacgttgaggtcgttgatcaaccctgaagaataagcgcaccacccaccctactcaggaaaaagctgatgtctaccgagcccctctgcctggtttttgtccccgcccttgccgccgtgctgacggccgccgaatcgaaaaaaggcgccccgctcaacgaagtcgaagtctgcgatctccgcgaccaggccacttgcattgcggtaaccttctccaccgcgttggcgatggaacaagaacggggttacccggatatcgttgccgaggattgctggaatgagtggcaacgcttgcgtcccgcacttcaatcgctcccgctctgatcagcataggtatccagacaactctgtagcgctcaacggtaaccacgatgcgaagcgagccgctgttgatcttgatctgcttttgatcttgatcttaggcgccccgttaaaccacgctggccggaattcgacagggatttggggggtaaaccggcagggatgccggcggattacgggcacaccgagcctaggcgaggtgccgagtggtggggcaagagcgttttgcttactttgccgcttttgcaaagtgagccgccgtcagggtggaaccctaagtggccgttaccgcaggaatggatatgtactcggtacagctgtgtcgcctataaggccgccttcgcgagcaagcccgctcccacagtttgattgcggggtgtcaggtagattggcgtcggctggcaggccgccatcgcaggcaagccagctcccacagttggatcgctgagtgtcaggtagattggcgtgggctggcaggccgtcatcgcaggcaagccagctcccacagttggatcgtgggggtcaggtagattggcgtcggctggcaggccgtcttcgcagcgatgcggcgacccgacaagccagctcccacatttggatnnnnnnnnnnnnnnnnnnnnnnnnnnnnnnnnnnnnnnnncttcctgaatgaacgcggcgcctgtgagtttttcgcgagcaagctcgctcctacaactggcattggggcaattccacagcgtccaagttgtggcaatacttatggcaagggcgccgtctacacagggggccaaacactctgcatcgcgtgccccaagccctatcgcctttgaatctgcaccgtggcaaacgtcggctcgtcgcgcgcctgctccagtacattcctgggcctttgcgaggcccgggcttgcacctcgggccgtagctcaggcggcggttgcaggcgcatgtccgagcgctcatcgctgggcgccacgccgaagaaatcccggtagcacttggaaaaatgcggcgtggacacaaagccgcaaatcaccgccagttcgacaatcgaaatgggcgtctgcatcagcaactggcgcgcacgggtcaggcgcagcttgaggtaatagcgcgatggcgtgcagtacaggtgcttctggaacatgcgctccaactggcggcgtgacacgtgaacataggcggccagttcgtcgaggtcgatgggttcttccaggttggattccatcagggcgaccacttcttgcagcttgggctgttgcgtgccgagcaggtgcttgagcggtacgcgttggtggtcgcgctcgttgcgaatgcgctcgtacacgaacatctgggaaatcgccgccgacagcgtgtgcccgtgatcgcggccgatcaggtgcagcatcatgtccagcggtgcagtgccgccggagctggtgaagcggttgccatcgagcgtgaatacgctggagctgaccttgacgcgggtgaacgcctcctgcatcgacgccatcagctcccaatgcacgctgcactggaagccatcgagcaaccccgcctgggccagcgcccaactgccggtgcacaccgcgccgaggcgtttgcagtacaggcgcgcctggctgcgcaaccaggcgatgagcgcagggctgatagcctgttgaatgccgacgccgccgcacacgatcaccgcatcgaagccgcgctggtcctgcgcgcacgcatccggggtcaccgacacgccatcgctggcccacaccggctggccgtccaggctcagggtttgccaacggtagttcttcgcccgccaattggttggccatgcgcagcggctcgaccgcacatgacagcgatatcagggtgaactggtccagcagcaaaaagccgatggtctggcaaacaggtgcctcggtttccatcaccgctaccccacaggcgtgatcaggaatgttccagcgccaccggcttgggtgcctggttgtgctggcgcgccgtaaccaggccgatgaaggaaatcaccaacgccaggccaatggtcgaggacacttcggtgcggtgctcgggcgtcaccatcatcacccccagggccaggcagatgaacacgatcaccaggtaagtcagccagggaaacagccacatacgaaaggtcaactcgacgttttgccgaagcagcaagcggcgcatacgcagttgcgagatagcgatcaccaagtacaccaacaacgcgatggcgccggagctggcgagcaggaactggaacagaccggccggcatgaagtagctcagcaacgtaacgcccgcaccgatgatggtgctggcgatcaccgccgcccggggcacgcccgccttcgaggtgattttaagtgccggtggcgcatcgccgcgtttgcccagggaaaacaacatgcgcgaggaaatgtagatcgaggaattcatgcaactggctaccgcgatcaacaccaccacatcgaccatgaacttggcgttggggatgttcataatttccagtgcacgctgataggaacccacggaggccagcagcgggtcgttccagggcaccacggaaatcacaacggagatcgacaacaggtagaacacgccgatgcgccagatcaccgaacgcgtggccttggcgatgttctgggccgggttgctcgattccgctgcggcgatggtcaccgcctcagtgccgatgaagctgaacatgatggtaatgaacgcgcctaccaccgccgacaggccgttgggggcaaacccgccatgttcttccatcaagcggctcaagccgctggcttcgcgatccgggatccagcccatgagcacgctgaaacccaggccgataaagccgatgatggcaatcaccttggccatggcgaaccagaattcgaactcgccgtatttggccacgctgaacagattggtgatcaccagcaacacgattgagaccaaggcgaacagccacgcatcgacctgagggaaccactggttgagcacatgcccggcggccaaggcttcgatgggaatgaccagcacccagaaccaccaatacaaccagccaatggtaaaacccgcccaggggccgatggcctggtcagcgtaggtggaaaacgagccggtgtccgggcgcgccaccgccatttcccccagcatgcgcatgaccagcaccaccagcaggccggaaaacagataagccagtaaaaccgccggccccgctgcggcgatggcgtgtccggagccgacaaacaaccccgcgccgatgatgccggcgatggacaacatggtcacgtgacgcggcttgaagccctgcgccagctgaccgttggaatcgttgcagttgaggctagtcattgtttttgttgttctcgggcggccaatgaccttcaccttaagtgcccgaggccaggcacaagtagcctggttacgccaccatcgtgcctgatatcgacatggggaatggtggccccctgaagtaacgggcggcgcgccctactcttgcgcgctgcgtatcaacgacccgaacagctcgccatgcggcatcttgctcagctcgatatcggcattttcgaaccactcccgcccagcttccgggtgcggcccgctcagcaccaccacgccacgttcgtaggtgtaccgcgccgccgctacatcgccattgtggtaagtagcgatgaccttgtagggcgcagcggcgctggctttgggaaaatacgggccgtcctgatagaacacagagtcaggctgctcgtcccacgtcacccgcacggcggcgtcttcaatgccggccacttcaaaaccgggacggccggcttcggtgtcgagggcctgggggatcaggccgaggttgttgtcgtcggccaggtaggcgcccatgcacaggcccaggtagcggccgcccttggcgacgtaatcgcggatagcttcggcacgcgcatcgcccaggctgtcgagggcggccgggatgtcctggccgccgccgggttgcacgtagagatcgtagcgcgccagggtttgcggggtgatgtcgatgggttcgtcggcgccaacgaagtcgatctggtaattggggttcaagcgctgcagggcggttttcacgttttccgagcaatccgggcaacccgccaagccacggtagatggcgacatgggtgatggggcctgcgccatgtacgggtaaaggatgcagcgtagcaaaggcgagaaacgtggcagcgagggcaggcagtttcatgggtaggctcaacggtcagttgaatggggttgatccagacgtggcagcgccaagcctataacgatgagccttttgaattcgtgaagagttgtaaatccagctcggccatttatccgtttcccagcatctgccataacgacgcgcctactccggtaatactctcaccggcgatcagccccgccgctgccgtgatcgcaaagcgctgcgtcacacttggccagcgacagctcacggcccaggtcatgatcgcgcccagggccatcatcagcgacaccgatgcaggcaagacaaacgccagtcccaaggctgccgcactcggcaggtagcgggcgcggtgtgtgggtaatgtgctgtcgaggatgcccagcagcacgccgaacaagcttgcaatgccgatggcccagcggatgctgggggacagtgaatccaaaccgtgggtcagggtttgggccacggctttccaggtggcgacggccggggccggccattgttcggtgagcagcatggtctgagggtcggggatcagcgccaggtacgcgaatacgccgacgatgctgccgacgaaaatcccgagaatctgggcgataacctgtttgtgcggcgtcgcgccaatcgccttgcccaccttaaagtcattcatcaggtccgtgcactgccccgccgaaccgccggcggtgttggcgctcatcaggttgatcggcacctggcccggcgcaacgatgccaaagctcagttgggacagttgcccgatggcgccaatcggcggaataccggttgcccccaccacccgcgccgccacggcggccaggcagatcgccaggggaatggtcagcagcgccatcccaaggttgataccgaacaacagcgcttgcaggctcaccaccagcgcgatcgccaaggcgaaccccacgacaggcccaggcttgggaaccgcccagggcgtgccgccagtcgctcgggttgagcgatgcaacgcccacaggcgaatcgccagggacgccagggtggaacacaccatcaggctcaccccgggccacagcagccactccaccagcgcggcaaattgtgggccgctgctgtcggcgggcaggctcaccaagccattggccaacagccacggccccagcccgccccatgccagcaaggcgccgagcagcagggtcaggcctacgcgaatgccgatgatgccgccgaaccccagcaacagcagggaggggtcggcggtgaaggtcaggcgctccaactgggcgttcggcgaccagcgcgggaaggcccacatgaaggtatccacccacttgaccagcccggacaacagcgccgcgccgagcagcactttcaagcgcgtggcggcttcgcggccatggttgtagatgtgcagcagggtttccagggtggccatgccttcgggaaacttcagtgccttgtcattgagcaatgacggccgcaggtaccacgcgatccagatccccaggaaacttaccgaaaacacccaggcaatcatcggcagcgctgccagttggttacccgtcagcagggtatacgccgggatgggcgcgaccagcccgccggaaatgatcgacgccgcggcagaggccacggtctggttgatattgctctcgtgcagggtccacggcaggtgttcaccggaacgccgggccatgccttgccagaggccatagccgatcagtaaggcgatgatcgacatattgaacgaccagccgatcttcaagcctgcgtagacattggaaggggtcagcaggatacccagcacgatcccggtgatgactgcccgcaggctcagttcgcgctctacaggcgcgattgacgaggtggagtgcatgcagattcctttcgagaaaagccagtgccacctcttaagtgagcgctgggagactcgaaggttcacctgccaaagcgggttaaaccggtaagggacaagccccggtcaccttctgtaggagcgagcttgctcgcgaaaaacccaaaggcgccgcgttcatccaggaaacacgcgttatcgtttacgtttttcgcgagcaagctcgctcctacaggaggcggtgtcggtgggcccgctatttggcgaacgcgtattccccgccccgctccaccgccttgcggtatgccgggcgcgcctggagcttttgcagccacgcggccaggttcgggtaggcctgcaatttgccctgggcctgggcgacttcgccgataaagctcatctggatatccgcgccgctgagtgcgtcgcccaccaggtacggcgtgtggcccagcacatcattcaggtagcccaggtagttggccagttccgattcgatccgcggatgcagcggtgcacccgcttcacccaggcgtccgacgtagaggttgagcatcagcggcagcatggccgagccttcggcaaaatgcagccattgcacatagctgtcgtaggcgtcggtggccgggtcgggttgcagttggccgttgccgtggcggcggatgaggtagtcgatgattgcggcagattcgatcagcacgcgggaaccgtcttcgatcaccggggatttgcccaggggggggatggccttgagttcaggcggcgccaggttggtcttggcgtcacgctggtagcgcttgatgtcgtagggcaggcccagttcttcaagtatccagagaatgcgttgtgagcgagaattgttgaggtgatggacagtgatcatagcggacagctccgttagggataagcagaagactacacgtcggaggtgaagtgccctgaatgttgttcgcctaaagagcaaatcacgtaatatcgctcaaggctcgactgttccacagcaaaggactgcacatgcaacgcatcgtgatactgggtaacgcaggcagtggcaaatcaaccctggcccgcgaccttggcaggtgcctgaatttatccgtagtgcatctggacagattgttctgggagcctaattgggtggaggccgacaatgaggtcttccgcgcgcgggtccggcaagcgattgcatcggaccgatgggtctgtgaaggcaattacgcccgacggactttcgatctacgcctgccgcgcgcagacctcatcatatggctcgacatacctcgcaccacctgcttgcgacgagtgcttatgcgcagcttgctggaccggccgcgtgcagataagcccgcaggctgcaaggagaaactggacagggagtttctgaacttcctgagcttttgctggaactacgatcgggtgagccgacccggcattgaagcggcgcgcatgaacatcgggccgcagattccagtgattcacttgcgcaacgcacaggaagtagacgagttcctgaaatgcgcagatcaaccctgtgggttcacccgcatgtactgactgaaattattgatgtgatcatccaggttatcctcaagcatcatccggtactggtcgcagaaatacttcaacatcgcttcccgcgcatccgccatttcggcgccggacttgaagttgcgcgcactggcccaggcattgaagcgtgtggtgccgaacatcattgacgcgctgacctcgccgagactttcgcaggtcttgagctgttcgttggacagttcgatatgggcgtctgcccggtcgtagaaggcttggtccgtggtgtcggccatggcgggttcctggtgagctgatgatgcggctattggagcatatccggggatcacagttctaatgtgggagatgtcgctcaggcgagcaactgatcgatccacttcacctgctgcacgatctcctgcactttttgctcgggcaccgcctgccgcgcttgttcgaggctggccaatgtcttgcgtttctcgcgcaatatacgttgccacttcgccaaaaaatcctcgctacgcgcctgcatttgcagcgggccgaagtacagttgctcggcggtataggtcatcgtctcggcgcgttcggcgacgatgatttcgtagtagaagcggttttcccgcagcagctcctcgtgcaggatctggtagccgttgtccatcaaccattggcgcaggggttgctcgccgccgttgggttgcaggatcaagcgttcccggccattgaggtgcgccttgccgctgtcgagaatgtcgcggatcgtctcgccgcccatgccgcacaggctgacagcggtaatgtcatcgcaggcttgaatcgccgccaaaccatcggccaggcgcacggtgatgtgctgcgccaggccgttgtcggccacggtacggttggccgcctgaaacggtgtagcggccacttcccccgccacggccgccgcaatagcgccgcggtgtatcagggccaccggcaggtaggcgtggtccgagccgatatcggccaggcgggcacccgccggtatgtgcgcggccacgcgctccaggcgctgagacaaggtgtgttcgttcaacggtgattccttaagagtgcccggaaaatcgatcccggctgttggtcaagtgcagcaccatggccgcgcgcgcggcgtctgggtcctggcgcttgatggcgttatagatcgcctcgtgctccaggttcgccaactgccccagttgggcaaagtccgcgccgccgcgctcgacggcattcacctgggtgcgcggaatcatcgccgtgcccaggtgctgcatgatgtcggtgaaaaatgtattgccggtggcttcggcgatcagttggtgaaagcgcttgtcctcctccacacagctgtcgttattggccagggaggcttggtagtcgtccagcgcctggcgcatgtgggccagttgtgcctcgctcctgcgcagcgcggccaaggccaccgcttgcacttccaggcccaggcgcaattcgagcatgttgcgcacgctggcgactgtgtctacatgcaagcgcaggcctggctgcgtgtgctgctcgagcacaaaggttccaatgccgtgacgcgtctccaccagccccgacgcctgcaacttggacaaggcttcacgcaccacggtgcggctcaccccatgctcaagcacgatggtggattcggacggcagtttttcacccggcttgagttgccccaaccggatgcgctgggtcagtgcctcgaccacaccctgggccaggttggcggaacgtttacgcacaggcggtgtgcttttaatcggcatcgagacgggtccacggggttgggctgggggggagcttatcaccctgagcgcacggggcgacgggtggcggagaaaaacacctagcttgtatgacaacacactcatcccaactcacccgagcctgtcttcgctttgagagaatcgcacaccccgagccgtcaccagtagggcaaaacccaataaaatctggaaaataaccaaaatagccaatctcaataccggcttataagaacaaaaacagctctcacaggattgcggccttcaaaaaacaacttgtatgatgtccgtcaacaaaacaccaagcccgcataaaaataatcagggggagttttcattcgtgaagcattcaagcccagcctcagccgcacccgaaagtgattcagcgctcgcccgcgccgtgagcaaagtgaagggccatgtgctcccactgttcgtggtcatgttcatcctcaactacatcgaccgggtcaatatcggcttcgtgcgcacgcacatggagcatgacctgggcatcggcgcagccgcctacggcttcggcgccggactgttcttcattggctatgcgctgttcgaagtgccgtccaatatgctgctgcaaaaagtcggcgcgcgtatctggctgacccgcatcatgttcacctggggcatcgtcgccacgctgatggcgttcatccagaacgaaacccacttctacatcttgcgtttcttgctgggcgtggcggaggccggtttcttccccggcgtgatctattacttcacccgctggttgccctgtgtggagcgtggcaaggccatcgcgatcttcctcagtggctcggcggtggcgtcattgatctccgggccgttgtcgggggccttgttgcagattgaagggctgggcttgcacggctggcaatggatgtttgccatcgaaggcctggcatcggtggcgctgggtttctttgtgtggttctggctggactccaagccccatgatgccaagtggctgagccgcgaagaacaggatgcgctggtggagactatcgatcaggagcaacgtgatcgtgaagccctgaccacggtcaaaccaaccatcggcaagctgctcaaggaccgccagatcctgctgttctgcgccctgtacttctgcattcaattgacgatctatgccgcgaccttctggctgccgagcatcatcaaaaagatgggcgacttgagtgatgtgcaggtgggcttcttcaactcgatcccctggctgatctcgatcattgccatgtacgcgttcgcctcgctgtcgggcaagttcaagttccagcaggcctgggtcgcaacggcgttgttgatcgccgcggcggggatgttcatgtccaccacgggcgggccgatcttcgccttcgttgcgatttgctttgcggccatcggttttaaatccgcgtcttcgttgttctggccgatcccccagggctacctggatgtgcgcatcgccgccgccgtgatcgcgctgatcaactccatcggcaacctgggcgggtttgtcgcgccaaccacctttggctttcttgaacaaaccaccgggtcaatccagggcgggctgtatggcctggccggcacctcggtgctggcggccatcctggtgttcttcgccaagacttcaccttctgccgtgtcggccgcgccaagcgctgtgaccaccggcacccctctcagcaaacccctttgagcccagtcaggaacttgccatgaatacccctatagtcacccacttccaagtcatccccgtcgccggccacgacagcatgttgctcaacctcagcggcgcccacggccctttcttcacgcgcaatatcgtcatcctcaaggacagcagcggcaacaccggcgtgggcgaagtgccaggcggcgagcgcattcgtgaaacactggaggacgcgcgcgggctggtgatcggccagccgattggccaataccagcgcgtgctcaaccaaatgcgcagtacctttgcctcgcgggatgctgccggacgtggcctgcaaaccttcgacctgcgcatcaccatccacgccgtcaccgccatggaagccgccctgctcgacttgctcggtcaattccttgaggtgccggtggcggccctgctcggcgaagggcagcaacgcgacgcggtgaagatgctcggctacctgttctatgtgggggatcgcaacgccaccgacctggactaccgcaacgaggccgacgccgatgacgactggttccgcctgcgccatgaaacagccctgaccgccgacgcggtggtgcgcctggccgaagcggccaaggccaaatatggtttcaacgatttcaagctcaagggcggcgtattgagcggcgacgcggaaatcgaagccgtcaccgcactggccgagcgttttcccgatgcgcgcatcaccctcgaccccaacggcgcatggtcgttgaaagaagccatccgcctgtgccgcgaccagcatcatgtgctggcctatgccgaagacccctgcggcgcagaaaacggttattcaggccgcgaagtcatggccgaattccgccgcgccacgggccttaaaaccgccaccaacatgatcgccaccgactggcgggaaatgggccacgccatccagctgcaatcagtggacatccccctcgccgacccgcacttctggacgatgcaaggctcggtgcgcgtcgcgcaaatgtgcaacgagtggggcctgacctggggctcgcattccaacaaccacttcgatatttccttggcgatgtttacccaagtggcggcggccgcccccggcgagatcaccgccatcgacacccactggatctggcaggacggtcagcgcctgacgcgcgaaccgttgaagattgaagggggctatgtgaaggtgccggccaagcctggcctgggtgtggatatcgatatggacgcggtggccaaggctcatgaactatacaaaggcatgggccttggggcgcgggatgacagtgtggcgatgcagtttctgattccgggttggggctttgataacaagcggccttgcttggtgcggtaaatcggctttaggagcgctcagcgcaatgtgagcgtgacgcaaaaaatccgatgcccaaacaggcatcggattttagtcagatcagaagcttagcggtttgacctctggcacgtctgccagagccctctttgcgctactgccgattagcgacctcgaactccgccgcatcctgctccaggccagagagatcagtgccattgatcatcggcccataacggcggctgaactcccagttgtagggcacgcggtctttgctgatcccgttgtcccaattcaccgaccaggtcatcaggcccttgatcgacaatcctttgtcgtgcaaacgcttgaatgtattggtcacggctgttgggttgatcacataaccggtggcagccgcgtcgacgttcgcgggcaggccaatgacgaacttgtctgccgggattttggtaaacccgcgcgttccgctcaccaggctttcggtcaggtaatacaggaagtcctctttcatcgcgtcgttgttctgggcaatccaggcgccgttgccattgttgacctcctgcacccagatgccgtcgccaccctggttgtaatactgcggggcgatgaagtcgtaatagccttccagcgcctggatgtaaccgacgtatttgccggcggtggtgaggtacggaaactccggcgccatgctgatgatgaagtgtttgccttgacctgcgtagtggtccttgaccaatttcaacgcggcgggcaggacagtcttgttgtcggcgaaatcaatcgcgctctgttcaagatcgatatccaggccatcaaagccataggtttccaccaggcggataatctcgttggccagtggctgttcgttgcctttatgcagttcgatgtgtgcatcggcgccgccaagggaaatcagcaccgccctgccctggctgttcagcacacccacctggtgacggaactcggcgtcggacaggttgtacggtttgaaggttgggataccgttgcccttcatgaaggccacggccaccacgttgtaatcctttggtacatccgccaggctcatattggcgaactggccacgctggtagccatcgctcgggccggcaggccagttgtgccagaagcccatgaggatctttttgccggcaatgctcggcatcagcgaagcggcatcgttgagcggcgattgcaatgaggtaaagtcaatctttgacatgttctaatccttcagaacgtgtgggtttaacggtgcgggcttatttgaagtccacatcgaaggcttgatagaaggcgttgccggtgttggcgacgatccacatcaacacaatcacatgctggccctttttattggccggcagtttcacttcatgattgaccttggccttcagctcgcctgcatggctgtagtacggcacctgggcatagaagtcttcagcgaacggctgggtttccagttgtgcgcgggtgatgcgctgtttcgggtcccagccatccttggtgatcagccagcgatagccacgggtggtgtgcggcgcggtgtatgcccaggtgaccttgaaggtctgacccggctcgacattgagcaacggccaagtgaaagcgcggccgagttgcttggccatttcctcgtgggtgaagttgacgcagtcacgcgcatcggtcttgccaccgctgaggatgaagccgtcggcgggtggggtgacactgtcactgtcggtttgataaggcgctgggaacggaccggccgtcagtgccgggaagttcttgccgccttccatttcattgacctgccaggtctccagcaggccaagatccacggcgactgcgccacggctggaaggggatgtgacacgaccatggcgaagcggtgtctgggtttgtggtttgttcattttgtgactccattcacttgattaagaactctcctttcttgaaggagaggacctcaacctaacggagttgcttttttttgccagaggcgcatttttcgctcattttcggttcatgagcgcgaagacccgcaaatactggatatataaacagtgttatagggaaacccttacgctaccagaggtcgatttcctacaagaccatgcgcatttcaatacagcttctctgtaccgatggcagccgtttttttaggggtggtcgcggtaatcggtcgcaccgtcagttccacgcccaatgccaacatcagcttctggaccgtctcataacgtgtctttgatccgcctttcagggttttatacaggctctcccgattcacccccgccgcttcggcaaccttgtttacacccagggccttggcaacctcggccagcgccttcataaggacgtgtgggtcatggcacgccatgctttgcgcaagataggcactgatggtttccgggctatcaaggaaacgtgaagcctcataggcgctggtgccggatgtatccaactcgaggatcggcatgtcctctggtttgaatgtcgacttactcatgtcattgacctctcagggcatcgagaatctcttttgcccgcttgattcctcgggcgtcccgccgatcgtattggtcacagattcaaatgtagcctactggctacttcttgtagatgccagtgaatttttaatgtcggtgtgcaccgccagaaaaaatcctagtccagccgctgcgcaggcagccgagcaatactattagcgcttatgtcctcaagaccgaaacattgcgtcgcgactgtaggagcgagcttgctcgcgaagaacgtaaagataaggtgtgcatccagagtgaacgcggcgcctatgattttttcgcgagcaagctcgctcctacagggagtgggtgagtgggccggcgttgatgtggacccgtcctacagcaagcttcaccaccttgctccattgcctacagttgcgtcagaatccgccggcttgtgcgcttggatgggcgtctctaaggtggcccggtcgctgacaattcagtgatcgggtttagtagcccgagggtcaattacacttagtgcatgagcttcatctatcagacattcctgtctgtgcctgatggtggctgtgcgtagggcgccttcgggtgcgccggctttgtgtaattccccggtctactaacctgcgtacagctgccaccctttcgtttagtagcgaaacggtgtcggccccactcaggaattacgcatatgtataaagtcacgcccaaccctccaaacgatccaaaccttgcgcttgatcaggcacaaccaccctcctcctcgctgttcagcgttaccgacgatgccagcagcgaaatgctcatcgccaacagctacgaaaccttttcctcggtcaccgcattgctgcttgatctgtcggatgaactgacgggtaaacagcgcgatgtcgcgttggcgattcatcagttgagtgagttgggtgttttgttggtggacaaattgatggcgagggaaagtgcttcaacggttagctagccttgcagccatcagtcgtcatgatcgacttcacgacgactcgacagcgcctttgcgccggtcaggccctcgaagcctggcgggcgctctttctcttggaagacgctggagccgccccatcctcgcgcagacgatcaatcagcatctgcgcattctcggcacatgccatgccctcgggcctaccttcgatgcccttgatgacgttcaacaactgagccttgttgtgagccagccgttgttgcaggacctcgatttcctcgaccttgtgcttgagcccgctgagcagcgcgtcatgctgccaaccaccggcgcttctgggcattaactgccggatttcctccagagaaaaacctgccgcctgagcgcctgtgatgatctccaacaccgcctcggtgccgggcgcatagtcccgatagccgttggacttacgctcaaccgattggatcagaccgctcgcctcgtagaagcgaatgcgtgaggccgccaacccgctgatttttgccaactcgcctattctcatgtcccatccataaaaaccattgaccttaaagctgactttaaacctaaagtcattgggcggccaaggcgcccgttaccctctacctgaaccgaccgattcaggtcatgctgcgtccttcatttcaaggacgataaaaacaatgaaagccatcctcgccgccctgctcctgataggtcttgccgcgcctgcactcgccaacgacaaccccatcggtttccaaaccactaccctccccgacgctcataacattcgcccattggagatggccgtgtggtaccccgccattaccaccgcgcaacccaagctgatcgccgacaacctggtgttcattggtgtgcttgcggtacctgatgccgcaccgacgcccggcaagcaccctttggtggtgctctcccacggctacggtggtaactggggcaagcaggcgtggctggccagtgcactggcccagcagggttatatcgtggcggcggtgaaccacccgggcactaccagccaagatcgcagcgccgaggccgctgcgcagttgtggcaacggcccagggatttgagccgggccatcgatgcgctgttggcgcagcccgagccattcggtgcggtggacagcggccggatcgcggtggtgggtcattccctcgggggttggacggtgatggagacggccggtgcacgtttcgacccggcgctgtttgcccgggactgcagcgccaatccgacgctggtcgcgtgtaccgcctaccgtgagatgaaccctgagggcactccgaacgggaaggcgcaattggccgcggacttgagcgacaagcgcgtcagcgccgtggtgtctttggacctgggcctgtctcgcgggtttaccgatgcaagcctggcggcgctgccggtgcgggcgttggtgatagcggcgggtgtaccgtcagcggatttgccggcgcagatggaatcggccgacatggccaagcggctgccaaaagcctcgacgcagtacgtgcagatcagcgacgccaatcacttcagctttatgttgcaatgcaaacctggcgcagcggcggtgcttgatgccgatgtgccgggcgacagcatcatttgtcaggatgggccgggggcacggccacgacctgtgatccagcagcaggtgatcacgctgatcagccagttcttggcacactgaatctctggccacagttaccacctctgccttgactgactggcattaacccagggcccggtcatatgtgttgaaactggtatcatccgcgcctttccctctcaggcatcgcgacatgaaccgccagaaaaaactccagcagctcttcaaggccaaagccaaaaaagccagtgccaagctggcgccaaaaagcaaagacagatacatcagcaaggccgaccgcttgaagctggaaaccgaagctggccaggactcggttacgccccccgagacgcctgctgagtaagacgcatggctgaaggggtggccgcttcatacttgccccagatccgccgcagatgccgcgccgaaccaaagcctgcgcgttcggcgacggtttcaatgcccaggtccgactcggccagcagttcgcgggctacggccacgcgcaggcgatgcaggtaatccaaggggctgatctgtacgtgctcctggaacaggcgcgccaggtgccggctgctggtgcaggccaggcttgccatgcgggtgagtgtccaggcttcgcagggggcggcagtgatggcgtcttgcacgcgatggaccgccgggtgcaggtgattacgcccggttatccagggcgacaactgcgggtcgctgccgctgcggcgcaggtacaccaccatgtctcgcgccaccgcgcacgccaagcgtggcccggccagttcggcaaccagatgcaacatcaggtcgatacctgctgtgacaccagcactgcaactgaccgggccatcagtgacgtacaggcggttttccagaacctgggcctcgggggcgagggcctgcagggtggcgcacagagaatggtgcgtggtgcattggcgcccatcgagcagcccggccctggcggcactcaatgcgccggcgcacacgcacaccagacgctcggccgagggggcgaagacgttttgcaaccactgggtgagctgatggctggccgattcgaaggccttttgctgggctttcgacacgttcatcgtggagcccaccaacaccaccagcgtaccgggggccagggtcgacggcagtggcgccagccccgtcagcggcaagccgatggaggtgtgcagcgttgccaccgggctgacgtattgcaagtcgaaatccaccgccgccgggtcgtcgacctgcgcggccaggcgcagtacttcggcaggcccggccaggtcgagcatcagcacgtttggcaatagcacgaacagcaccggtacgctcaccacttcactccgccagtgcctgggcaaccgtcacgatgcgggcgaagcggtcatcgaggaccaactccgtgcattcgcgaatctcggccggcgtatagacccggccgctacgcgcgtgggtcatcgggaaggtcagggtcgcctcgctgacaaaatccaccttgaagccgctgtcggaagcctgccgcgtggtggtctcgcagcattgctcggtgcggatgccgctgatgatcagcgtggtgacgcccatttccaccaggcgcgcggccagtggcgtaccggccaaagcgctgtggtagcgcttatggattaccaactgcggattgatcgacaactcgctcagtgccctgacgttgcccgactgcatggagaaatgcccctggtcttcaacatggaagacttgtaccaccgggatgccccgctgaacacagccgtcgatgagcgcctgctgtttttccaggtagtcgggcaggtcattttcggaccagtaggttgaatggcggaaggaatgttgggcgtcgatcacgatcagggctttatgggtcatggacagtccttgtggcttgcatcagtgggtaaatgatgcacgccatggtaaggaccacctacagtgcgcgacagacgcaaggcagactacttcaggacggattcggatatatcaccgggcacgccatagcacaacggctgccgggttcgaagccatggacgtattcatccgccaggatcgtttccagacgcggatcgaggtgaattgcaaagcccaggcgccggtagaatggagcattccagggtacatgcttgaaagtggtcagcgtcaccgcacgcaggtgttgggcgcgggcatgatctatcgccgtttccatcaatctgcgcccccagccctggccttggagcggctgagcaaccgacacttcatggatatgcaggtcgtcgccaaagcgttctgcgctgaggaagccttgagggtgatcgaggtcatcaaccaccacccaacaggtcgatagcgcgatccactgccgatggcactcgacgccgatcggcgcggcatccgccagccaagccagcccttcgattgcgcgaaacgcctgggccgcgcactgctcgatggcgggcaacaaaccggcatcttgcgcgcgcgccaggcgaatataggcggactgctcagcagccactcaatgccacctggggccgttcgcccgcaaagaagaagggccgcaagcgcacgcccacgccgttgccgataaaggccgccaccaaccacacccagccatgcaggctgcccgaggcgatgccactgaagtacgcgccgatgttgcagccataggccaggcgcgaaccgtagccgagcatcaagccgccgatcaccgccgcgatcaatgaacgcagcgggatgttcaggctgggggcgaagcgcccggccaggcctgcggccaacaacgcaccgagaacaatgccgatatccatgacgctggtaatgtcttcccataccggtgcagccagggccttggcattgcccggcatttgccagaatgcccaactggcgacgtctacgcccagcccgctcgccaccttggcgccccacagcgcgaacgccgaggtaatgccccatggccgcccggccagggccagggtcacgtagttgagcaacgccaggccaatcgcgccccacaccaacggccacggcccgcgcaggaagcgacgcagcccttggtgctcgctttgtacgccttgttcaagctgaccatgacggcgcttttccaggcgcacggtcaccattgcaatcagcccgaacaccgccaggcttagaaccagcgccggcagcacaccgaaacttttgacaatggaaaccgccgggaacgatggcagtgcaaaccaccagtcgacgtgatggctggcgatcaacgagccacaaataaagaacagcagtgtcaccaacatccgcgcattaccgccgccgacggtgaacaaggtgcccgacgcacacccgccgcccagctgcatgccgatcccgaaaataaacgccccgaacaccaccgacacacccgctggcgccaccagcccggtcaccggctggccaaacaaagtgcccgcgcccagcgccgggaaaaacagcaccaccgccaccgccagcatcaccatctgcgcacgcaagccggcgccacgccgatcattgataaacacgcgccaggccgaagtaaaaccgaaggcagcgtgatacaaggtcaggccgagcgcggcgccgaccaccagcaacaacacctggcgcgcgcccacagtgttttgcaggaacagagcgcccgccaccaggatgacaaaagcgatcagtggcgcgacgggcttgcgcccgggcgacagggaaagagaggtgctcatggggatctcgattggttggaaggaggcaagtatagcctcagacgcaatttgatcaggtggggggcattgcccaaaggctcattgtttgacccaccgctttcgcagcctcgctaaagctcgacagctcccacaggggatcggcggtgtatgtggaatcacgctttgcagggccaccgcaccaaacacaactcccgacaataacaccgctcaaaatgtgggagctgtcgagccccagcgaggctgcgaaggcggcggcacaggcaacactttcatcgcctgaaccaccgcttttcgcagcctcgctggggctcgacagctcctgcaggagatgagcaggcctgactaacccaggctgatcgacttccacgccgcttcagccagcagttcacggtattcaaatggactctttttgaccttcgccgacaaccacgcacgcgagtaactttccgccgcaccaatgatcagcgaagggatcagctcggcaggcaagtggctgaaatgctccttgcgcccttccccgcccatccattccttcaactgctggttgcgctgtttattgcgtgcaagcagctcgtccttgaacgggccgctggagacggcaaaacggctttggaacacgaaccgcgcccagttcggctgtgcggtcacccattcaacgtagctgtacaccagcccgacgacacctgcgtgggcggtgtccgctgcttgcagatagtggtcacgcagactggcctggtcctccaacgccgcaaagaacagcgcagcgaccaacccttctttattgccgaagtggtgatagatagcgcccacgctggtgtcgcagcgcgcgcgaatggtttcgatagaggtcgcctcgatgcccacctcgttaaaacacgccagtgcttcgcgcaggatgatgcgcttgaggtcgctgcgcctgccggggaaggtgcgctcgatgagatcgatggagtgcatggaggaacgccaaatcaaaacagtttataggctgaacgaccggcagagaaagctcaggttgacagccgtggaatcaacagaatattgttctgttacagaatattattctgaaaatgacccttgaggatattccgatgagccaagccctgagcatgttcaatagcgtaggccccgctgcattcagcaacctggcctgccagatggccccctacttcagcaccatcactcccgagatcgcggagctcaaacccaaccatgcggtggtcaccgtgccgtttcgcaaggaaatcaccaaccacctggcctcggtgcatgccatcgcactgtgcaacgccgccgaactggccggcggcatgatgaccgacgcgtcgatccccgcaggcgcacgctggattcccaaaggcatgactgtggaatacctggccaaggcgaaaaccgatatccgcgctgttgccgatggcagcgctatcgattggcagactgcgggggacaagatcgtgccggtcgagattttcgatgcgggtggcgtcaaggtcttcaccgcccacatcaccatgaatgtgaaactcgcttaggcattcggccggcccaggcagtatcagctacgcggcatctgcaatgcgtgactggacgcctggtgcggtcgacgatgcactgcgaagcggtgcggattgccgtggtggtatcgccggcgatatgcggcatcaattgcgcatcggcaataccgccaacggcgagctgaaccggtcttttccagggcgaaggtatcaatggcgaacgccttatcggcatatcaaataagaggacgggaaagatcatcggccgtcaaaaaaatacctcttctcccaagagacacggatcaaagcttttaactttctgattaaccagcgctaaataaaatccttcgaaaacgtcttactcaatgggaagtctcggcacacatagcgtgcgagagaaacctaaaaatcttcataacccctgaacgtcagccaattgagtaggcgaagcgctcgcgagtcctatccatcgacttattcaggaacatacgccccggtgaaacggcgcgccctagttcagaaggatctctatgcaaagcctgccgttctctgcgttacgcctgctcggtgtgctggcagtcatggtctgcgtgctgttgacgacgccagcccgtgccgactacaccgacctctccctgacccacgaaaaaaacatccagtcctacgtcgtgaaccccgacggtagctttgtgctggatgtcgaacgggttatgcggatcaatgaagagcgcgcgatcacctccaacgcccagcgctctgtgacctacaatcgcaccctggaaactctggatattgtcgaggcctacacgctcaaatccgatggccgcaaagtcgtggtaacaccagaccggatcaaggagcagcaggaactggagtctgcccaggcgccgatgtttcaggactcgcgggtcaaagtggtgatcttcccggagctgcaagtgggtgatcgcatggttctgcggtaccagcgccatcgcaatacaccgttgtttgcggggcagttcgaagaccttttctcgccggacttttaccagaatgagcaggtgcgcctgagctacgacatgcccgccgaaatgaagctgtacgccgactcacggggtttcaaagcgtccgcgccagccaacgccaacgggcgaacggtgtaccgctgggacttggagcaaaccaagaaaaatcgcgtggaagatggctccgttgcctacaccgactacgggcaactgctggccgtatcgacgttcaccgactacaaacagtttgcccgggcctacgccgcacgcgcacaggtagaagtgaccccggccatgacccaactggccaaggaactcaccaccaacctcgacaacccacgcagcaaggccctggtgctgagtgactgggtacgcaagaacatccgctatgtggccgtgtacgtcggcgccggcggcgtagtaccgcactcagcgcaagcggtgctggataaccgctacggcgactgcaaagaccatgtagccctgcttgaagcgctgctcaaagccgtcgccattgaaagctcgcccgccctgatcaacgccggcaacgcctacgtactgccccaggtgccgactctgggcgtgctcaaccatgtgatcacttatgtacccagcctcgatctgtacctggactccaccgcgacccccatcgccgctggctacctgcctctgcccgaactcggcaaaccggtattgctgacacagaccggtgagcgtaagcagacaccgtcccgccagcctggcaaagtggacacaaccatggcgttcaaggtcaacaccaaaggcgctgcagactttaccaatgactccaccatcgacggttggggcgcggagcttaaccgcttcatgctcaaggccatgcagcccgccgaccgtaatcagttggtgcaacaggtcctgagcatgtttgggcaatccggtagcggcgtgatcgaaactgacgctttggacagtactgccaataccttcaagttcgcgatcaatggccacaccagcaacctggtgaacctgccgggcccgactggggtgcctaccctctccagcctggccggcggtattggccagagcgtgttttccttgatggccgaaaaggaacgcactcagaacttctcctgcctttcgagtgaaatctcagaagttgcgcgcctggagttccccgccaaggtgaagatcctcgcggtgcccaaggcagtgtcggtgaaacacgcaggcttcgactatcgctctacctatgtgaagaaggccaatacggtgctgatcacccgtcagtatgtgtttagcaagccagagattctctgcaccccggaagattttgcggccatgcaaccggccattgaaggcatggtcaacgatttgaaaagccaggtcattgtgcagacgttgtaacgccctggcccttcttgcgtgtcagtggttatgcactggcgcgcgggaagcggggactgcatgctgaggcgcagctataaaaccgttcctaacccggttggcgcttctgtgaggcgctatcagcctttaacgttctgactcgacagcccgcacgctcgtaaaatcaagaatgaccgtaaacctctgttgctcacggatcacctcaatctgccagcccagctttgcgcataactgccgcatcaactgcaaccctagaccatatccatagtcgtcggattcctgccgcggcctggcctcgttgatgtaattggcaatcaccagcctggggtatttgaaactgatgtccaccgtgccctcttccgcgtattgcagcgcattgcgcaggaagttgccgatcacgatacggcacgctgtagggggcagtcggcaaggttcgttgtggatgtcgatgctcagctcaatatcccggtgaccgatcaggtagcggtgtttttcaatcaggtcgcccaccagctcgctcaggtcaacgtcttcttccggcagcggctcgggacgctcgcggctcatccacagcaatgtttcggcgatcagttgcatgttcatcaccgaacgttctatgcgctgcaatgagggtggcagcgcaccgcccgattgcagggccaacaattcgattgtggccttgagcaccgccaggggcgtgcgcagttcatggctggtgtaacgcaacaagcggccttctcgttcgctggcggcctgcacctgctcaacacttttggccagggcatcggccagcatattgaactccttgaagctgaaacccggtcgagcgccggtcagtgcctcagggtctttgagtgtgccggaccattgcaccaggcgccccagcggccgaaccagccaccagaccagcaaggcgatgataatcagcgccggcacgaataccgccaggctgatgaacttgacactctctatgacctgatcgaaataggcatcagacaacggcgtctccacctctccacctgcttctttatcgtggtcgatgtcgtacatgtagagggttttgccgtcacccaggggctgttcgaggatgatctggaacggctcgtcgtcgtcatcggaatagagatcgccaaagatattcaccgcgccgaaggacaggctcggcgatgtagtgagcaactcgcgcacgtcctgcggcaacgcctccttgccgatgacgctggtatagaagtaattgtgcggcgtcggcgtggtcgggtcctgtttgtaatgccggagaaaatactgagcttcctcctccatcatcgcgctggcggtgtagaacaggccccgcacggtgaattcaggcagcagcttgctgtagatcaccagcaccaccgcaatcagacacaggaaactgccgctgattacccacttcaagctcaggccgttacgcatggggttttacctgaatgccgacacccgccagggtatggatcaacggccggccaaagggtttgtctaccgtcttgcgcagccgatgcatatgtactttgagggtattgctgtcgggtggctcatcgccccagattttgctttccaaccgctccctgggaacaggctcgggactggcgcgcatcaagtgctcgagcaaggcccagcagatgggtgacagatgcaactcctgccctgcccggctgactttgcgggtggtcagttccatgaccaggtcgtccacttgcaggcggctggtctggccgctgcgccgcaggctcaaggcgcgaatccgcgccaccaactcggcaagctcgaacggcttgaccagatagtcgtcggcgcccgcggcaaaactggcgagcttgtcgggcaacgcatccagcgaggtcagcatcaggatgggggtctggatgccttgctggcgcaaccctgcgcacacctgctggccgtccagtcgcggcagcatgatgtccagcagaatgacgtcgtaatgctggttgagcgccaggttgagcccggcctggccatggctggcgtgatcgcagacgatgccgctgatctccaggtactcgataacggtggtggccaggtccaggttgtcctcgaccagcagcagatgaatatgcacggaaaaaacccctcgggcaggcagtgcgcagcggtgtgaaggatagcggaagtcggcaggtttcccgtgatgtttacctgacgttaaccccgtgctgcttaggctaaggatcttcttatccagagctcgtcaccgtcatgaacctgtattcgatgatcaaaggggtgctgttagccgtgattttcctcgcgctgatggtgggcatccttccacagcaaacgcagttggtacgcatgggaggcaatggctggtttctggttggccagaacgttgagcagacagggtcgtgtgatgtcgcccgtgcgtcgtgatgagattggcgccagctataccggccagttggtcgcctgcgtggtgctggttattggtgtggcggtttcgatgggtatctatatcgcgcgcttgaatgcgcacctcgatgagcaacgcgacctgtcctcggtgtatctgcccgactgccctgacggccgcggtggttttatggtctatcccgatgacaggcgcagtggtgaccagtgctacaccgccggtgaggatgaatcgatggaggtcgatgaggcgcagcggctatcaggctcgaacctggcgcaatggttcgactacctcctgcctgcaattcaaaccccgagcaggctctagatacgtaatgccgttcagtgacctctgtaggagcgagcttgctcgcgaaaaacgtcaacgataacgcgtgcttcctgaannnnnnnnnnnnnnnnnnnnnnnnnnnnnnnnnnnnnnnngcttcctgaatgaacgcggcgcctgtgagtttttcgcgagcaagctcgctcctacgagcctattgctctggccaggcgccgcatggcggcttcgatttcatgggcggtcaaggatgaataccccaacagccaaccttgtttcttttcctcgccggcgtacagccggctgaggccgggcaactgcacgcctgcgctggcagcttggcggatggtgttttcctccgaccagccatcggccaaaaggcagggcatctgcagcccgccatgggggcacaaggctgtggcaattcccttcaagtgtttgtcgatggcggtgagcatgacggcacggcgcgcggcgtaaagtttgcgcatcgcccggacatgggcgtggtagtggccgtcctccatgaagcgcgccagggtcagttggaggatctgtggcgtgtgaccgtccatgatgcttcgcgcataggtgaatgcgctgaccagttcggctggcagcaccatgtagcccatccgcaatccgggatagagggttttgctgaaggtaccgaggtagatcgtgcgctgatatgggtccaggccctggacgcaggcaatcggcggcccgtcgtagtggaactcgctgtcatagtcgtcctcgatgatccacttgccctgctcggccgcccaattgatcagctccaaccggcgctccagcgctaacgtggcgccggtggggtattgatgcgaaggcgtcacatagacgcaattggcaccgctgcggtctgcccgcagcaggtcggtgcggatacccagtgcatcaacatcaataggcaccacccgggtctcggccgcttcaaaagccttcttggcaccgtagtaaccggggttttccaggaggatggggttgccggcgtccactaatagctgggcgcacaggtacagggcctggcgagtactgctcaatatcagaacctggctgggtgagcatttggcaccgcgctcgaggttcaagtaggtggcaatcgccttgcgcaaaggctcggcgccttgcgggtcgccatgcagcaggacgttaccccggtagtccttcatggcctggcgttgcaggcgttcccatatatcgacaggaaaggtacgagtttccggcagcccggtggcaaaggccttgaccgcctgttgatcggtcacgccacccgtatcgaacatcctccggccgcgccggctcaagccagaccctggcgctgcatcgttgcgcggggtttcttgcattttgatgcgccggcgcgcagcaccgcgtaactctgtgcccacagcctccgatacatagctgcccgagccttcgcgtcgcacaatgaagccatcccggtgcaaatgcacataggcgttctcgaccgtgtcgcgggcaacaccgagcgttttggccagcacccgggtcgccggcagcttcaggcctgcatcgagggttccctccagaatcaatgcacgcagggcacgctggatccgctgatgcagatccagccgctgaaactcggcatcgttgagccggattttcagtgtttcgagctcgaaggttttcgccatgcggtctgctctatatgaataaattggccggaaggagcaggccagtttatacgtagactttgcgcatcgccatttgcaaggagcaacgtaacgccatgccttcgtcaacacccaacgcatcggttcgcctcagcgacctcatcccgccgattgtcgccggcctgatctcggtcatcgtcaattatggcggcaccttcattctggtgttccaggccgccaaggtcgctgggctgagccctgagttgacggcgtcctgggtgtggtcggtgtccatcggcgtgggggtcaccgggctgtttctcagctgggtttcccgcacacctatcatcaccgcctggtccacaccggctgctgcctttctggttgtggccctgtccaccacgccctatgccgaggcggtgggcgcgtacatgatctcggccgcggccttcgtgctgctgggcttatccggctatttcgaaaaagtcatccggctgatcccgccaggcgtggccgccgggttgctcgcgggtattctgttgcagttcggcatcggtgctttcggcggcatgagccttgacccgatgctggtcggcttgctgattgttgcctacctggtgctcaaacgcctgaccgcacgctacgcggtggtgggtattctggcgttggggctggccttcttgctggctcagggacgggtcgacttgtcgggcctggcactgcaactggcggcgcccgtgttcacccggcctgagttctcgctcaacgccttgctcagcgtcgcgctgccgctgtttctgatcaccctgaccggccagtacatgcccggcatgctggtgctgcgcaacgatgggttcaacaccagtgccaaccctatcgtgaccatcaccgggctgggctccttgcttatggcgcctttcggttcgcacgcgttcaatattgcggcgatcaccgccgccatctgcaccggcaagcaagctcacgaagaaccctccaagcgctggatcgccgggattgccgcaggcgtcttttacatcctcgtcggggtcttcggcgtgaccctcgccgcgctgttcatggcctttccggccaccttcatcaccaccctggcagggctcgccctgctcggcactatcggcggcagcctggccggcgccatggccgatgccagctcccgcgaagcttcgctgattacctttctggcagcggccgccaacatcacgttgttcgggattggcggagcgttttgggggctgatgattgggttggtggcgtacgtcgtgcttaatggggggttgccgcgtcgggagcctgctgcccgtgagaacgctgctaactgaggctccgcgacctgagctcaaacgcagcccgcctaccactcaaacgcttcgatatggcattcggtcatgtctatacacgccttccgacaaagaaaacagaacctggctacgtaaacagacgcccgttgcgcacggaaatccgcagacaatctctgcaagatcaagctccaactgatcggaggggatcccgggcactgacgcaaacggacgcgtgttggtagtgacctacacctaccgcgatcccaatttcgtacgcatcatcagcgcccggcttgcatccaaaaatgaacggcgccagtacctggaggtttgagccatgaaagacgaatacgacttcagtaacgccaagcgcggcgccatcgccagcaacaaaggcaaaacccgtatcacgatcatgctggacgatgctgtgatcgaagccgcccgtgaacgtgcccagagtgcaggcaccggctatcagaccgtgatcaacaatctactgcgacaggcattggtttcccaggacacctataacctagcgccagcctcgaagaagcaagccaaaaccttgcaagtcctcaacaatggcatcagcgtctcagaggtcgaagcgttggaacagcagttgatagcgctcgctggagaattgaatcgaatgcttgttaatccactgcctgccaaatcaaaaagcaaatctgtctgaatcggagggctagagtttgcttcgtgcgaatcgcgccatgcaggccaaatcctaggcaaaaaaagcctgcgcctctgcagcccgcctcccgcggctgaaagaattttgtgagggccacggggcgagggagagcgggatgacgataaccgctatcgtaaacctggttaatccttgttcgatttgaaactgtaaggtaaccgtccgcccccccaccgtaagcgtctaccgaacacaccatcttgcactagcccgtcttggtgcggagtcacccccgcagttcggtatgagcagttggcaatcgggagtcctattgactttgacaacgattctggcggtagcggttggcgttcggcctttcgctcaattggtgctcttagtcgggatcttgcttattttcatggcgttcgcagccgcgcttttcgctggccttctgcatactgcttggtggtttcttatgcgctatgcgaccaagtctgcgggtgtgtctccctaagtccagtggaccctagccgcgcctatgctatagtcaaacactattttacttttgacttgttctggcgtctgatttatgcagttttccaaatatcacgctgcgggtaatgattacttagtttatacagcatcagcccccttctgctttaccgagcaggaaatatctagaatttgtgaccgccaccatggtttgggcagtgatggaatattggttccgttgattaatgcaggtgagatgctatcggtaggtatctacaacactgatggttcacaggcggaaaaaagtggaaatggcttgcgcatattttgtcgctatttgtgggatcaaggcattgttgcgagctcacactttaaggtctccacaaagggaggtgtggttagctgtcaggtactggatgtaggcaagcgtatatcgattgccatgggtacggcccgatttatagaaactaccgagtctacctttctcattgatggaacagcgcttctattgaatcccgtgtccatgggcaatcctcattgcgtgatatttgttgctcaaccgacggagatattggctagaaatctggggccaatcattgagaatctctctattttccccgatcgtaccaatgtccagtttgtaagagttatcgacaggaaaaatctcgaggtgcagatctgggaacgaggcgtaggctatacactgtcttcaggcaccagcagttgtgcggcggcggctgtttctcgaaaacttggtttaatcgatgctcaggtcgccgtgcgaatgcctggaggtgtaattaatatcgaacttgataatgactaccacgttctgatgcaaggtccagtgtgcaaagtcggagactactcactggacgctgaatgccttgtccaagaagatttttagggtcactagtgataccgagggcacgacagcacagagtgcaaactcaaaccattatttaatgtaacgacaaaccctccattcacgccatgaccgccactacagcggccctaatatcgaacttagcattcagactcgatattcttgaggtataaagttctttactatttcttcgcatgcccagcccatcatattagtgcctagtgcaaatcatagcgatagacctgcagaacaccagtcataaatctaaggcggagccacaggcaaatcggatcaatttggctgtcattagctccctccaacgggtccagaacgcgcagttcactagatgccgcacattccctacaagattccaagaaacgtctgactggatcgccataacgtttaagtcgattatctggactggttcgctgtcgtagacagcacttgccgaggtgacatggatcttgaaggtcaccacgctatccgtgttgatcagctgtagttcgcaaaatattcggtagcgcggacagtcgtcgacattctcgccgaccgaatgcaccaaccctcactgtgacgggagcctgccgtcaggtggggtctttacgtcacttgccaatcgcaggagacatgatgaaactatcgcttgccttatatgacgcgctgacatccatcagtgtgccaaataacaaagctaaagctgttgtagatgcatgggaggacgatgtgaaagatttcgcttcaatatccgacttagagcgtaccgagtcgcaccttcagggttcgatcactgcattacgtactgacctcaccgccttgattaaggagcaaggcgcggatttgcgaacactggtcgaacgccaagccagtcaatttcaaagctcagtgtcaaaactagaatcaaacataacggtgcttcgttggcaattctggctcctggttctctgttttggcttccccattttgaagagcctttacgaggtttacgggaaagtcgtcacttcttgatccatcgcgacaccctcagccatcagtaaccaaccggtggcctattagctttaagacgccggccttgtccgtgtcctgatttgtagctattcagccatgcggggaacactcgccgtatgggcgacgtgtctcgccgttttgggctttttgcggagagacacatgaaactcgaaaacctcacatcgttgcaaacccagctgttcaaactgccagtcgtcttcacagagtgcgcttggtatgaggctgcctacctagagcaacctgcgagcttcggcgacttggacagccgcttaggcgacaccctcgaagctgcctatacatgcctcttccccccggggtcgacaaggatcaaatcgaaatcttgagcgaacaccggtatcaaattcttgaggcgaaagcgtccatcagcagcatgaagcaacaaacttccaagctgatttatcggatcattcgaatggatcaggtccgaagacccgcgtcggcgcagaacgcgcctagattggcgtcaaccgtggttttccccggcccgcctttggttgaaacgactgcagcgactttcattggccttacctctgaatcgaaggattagagatggcgtcatgctaagcgcgctaagcgtttggattgctgggtcaaatcccaagcaaaaaaaagcctgtatctctacaggcttttctctatctggctccacgacctggactcgaaccagggacccaatgattaacagtcatttgctctaccaactgagctatcgcggaattcgccgtatgttactgattaaaaagaagaagtcaagcatcctctgacactttccgtaaatcgcccccctgcccgcttgaatacgacggctccttggcaagatccaaccaggcccgtgccgccggtggcaggtgggcgctggcgcgccaggccagggcgatatgccaatcggtgtggggttcgtccagggggatcaaggcgatgccgggatgttggtgtttgtgcgccagcatccggggcaggaaggcgacgcccaggccggcggtgaccagatcgacgataaagtcgatctgcccgctacgagcagtgactttgggggttacgcctttacgctcgcacgcactgaggatcttcgcgttgagggcaaaacccgcttcgaacaggatgaacggcgagtccgccaggtcggtgaagtcgatgcgcttgcggcgggccaatgggtggctgacgggcagcactgcgatcagaggttcgttgcgtactggctggtagtcgaagccttcgtccaccggcagcagcagtgcggccagatcgacttctcccgcttccaggcattcgcgcagccttttactgccgtactcggtcagttcgatgtcgatgcctgggtagcggctgcggtaagtggcaaacatggccgcgaacagcacgccgcaccctaccggcggcaggccgatgcgcagcaccccgcgcctgaggccgcgcaggtcgttgatttcggccatcaggtcggtgcgttcggcgagcattaccaaggcgcggcggtaggcaatttcaccggcggcggtgagttcgttcttgtggccgagacgattgagcagtggcatgcccaattcgtcctccagggtcttgactgctttgctgacggtggactgagtgagggcaaccacttcggccgcctgggagaacccgccttggcgcaccacttcgacaaacgcacgcaaggttcgcaagttcatcagtattcctttggcgactggatagcagtgataaaagttgttttcatcatggcataactttgcttagggtgtagcactttgccctgtggagacaccgtcgatgatcatctcgtccgcttccgactaccgcgctgcggccaagcgcaagttgccgcgctttctgttcgattacatcgacggcggcgcttacgctgagcacacgttgcgcgccaacagttcggacctggccgagatcagcctgcgtcaacgcatcctgcgcaatgtcgacgacctgagccttaccacccagctgttcggcaccgaactggcgatgccggtgatcctcagcccggtcggcctgaccggcatgtatgcgcgacgcggtgaagtgcaagcggccaaagcggcggccaacaaacacatccccttttgcctgtcgacggtgtcggtgtgttcgattgaggaagtggcttctcagagcccgcagtcgatctggttccagctgtatgtgctcaaggatcgcggcttcatgcgcaacgccctggagcgggcgcaggccgccggggtgaccacgctggtgtttaccgtagatatgcccacacccggcgcacgctaccgcgacgctcactcgggcatgtccggcccctatgcggcgcagcggcgcatgttgcaggcggtgaccaagccgcaatgggccttcgatgtgggcttgatgggccggccccacgacctgggcaatatctccaaatacctgggcaaacccacccacctggaagactacattggctggctggccaataacttcgacccgtcgatcagttggaaagatctggagtggatccgcgagttctggaaaggcccgatgatcatcaagggcatcctcgacccgcaggatgccaaggatgcggtgagtttcggtgccgacggcatcgtggtctccaaccatggcggccgccagctcgacggggtgctctccacggccaaggcgttgccgccgattgccgaagcggtgggcgatgacctgaccgtgctggtggattcgggcattcgctccgggctcgacgtggtgcgcatgctcgccctgggtgccaaggcgtgtctgctggggcgtgccaccgcctatgcgctggccgccgagggccagcatggggtggagaaccttttggatatctttgccaaggaaatgcgcgtggccatgaccctgaccggggtcacctccatcgcgcagatcgaccgtaccaccctggtctagtggtgatgggtgcggtgtactttgttcacgaataaccgaagcgttgtttatttgcgacaagcaactcgccccaccgaaacagttacgtcaaccgggctggcggcaacgctggccccaatcagccaaataactgacgccatgctttaacggacttttcttacttaaaaattagttaattgatttataaggatttttgccaactaaatacacttggcatgaatctcgctctagtactgttcaagcaggttcggcgatgacaagacgtgcggcagtgccccggggttataacccaaggaaaagcggtttaaactgtttccaatgttttacggaactgacggatcagtaagacgcttggcactcgccactctcatcccgcctgtaagacagcccagtgcttagaggccacccgcttatgaaaacccccacccagaccaacgcaattgactttgacagtgccaaattgcaacgcctgggatttggccagccatccttacgcccacgccgccccgccaccctcgccgaacttcgccagcaactgaaccagcagttgcagaccagcctggagccggagcgcatcctgggtctgttctttcgtgaggtacagcgcctggtgccgctggacgcgctgcaataccgtcacgccgccagcgacctgcgcctggagtttggccacaggggtcatcactccgtcagctacaccctgagccatgaaggcgagcacctgggggaactggtctttcgtcgcaaccagcggttgcttgaagaggagttgagccagcttgaactgctgctggtgaccttgctttatccgatgcgcaacgccctgctctaccgcgccgccacccgcagcgccctgcgcgacccgttgaccgaaaccggcaaccgtgtggccatggaccagacgctgcagcgagaaatcgacatggcacgccggcacctgcacccgctgtcgttgttgatgctggacatcgaccatttcaagaaaatcaacgacacccatgggcatgccgcgggcgatagcgtgctgcgcgccgtggcgggggcgatcaaacgccagttgcgtaacgtggacatggtgttccggtttggcggggaagagtttttgatcctgctgtccaataccggtcgcgatgccgcgaggatggtgggagagcgcctgcgccaggcggcacaagcccaggactactgggtggagggcacgcgaatcgaactgaccgtgagcctcggttgctcgacactgctggcggccgagtcggctgaaagcctgctgcgtcgcgccgataatgcgttgtacgtggccaagcgcgaaggtcgcaaccgcttggcgatggcggggtaaagtcagttgtggcgagggagcttgctccctctccacagttaccgctacgcctcgctggcgatgcgcacagggcgctcgcgaacggctggcgccttgtctttctccgcattctctagacgcatgcagctttccaggaacaagtgcatgtagtcgtagctcttgcacaccgcctggcgtaactcttcctgcagggccttgctcgggttggtcccggccagggtgcagatgatttccagggcttcccaagggtgggcgtcgtcgtactgggcgtgcatcttcagccacttcatcgcccgcttgcgatcttcctccgggaaggcggcagcataaacaccggtagagcagaccacggcggaccactcccccgtcgccccctcgatcgcgtagttggtggcggcaatcgcgacgatcaatgcatcggccgagctggtgtgccagcaccaatggctcagggcgtgcaactcgggcggtacctcctgcgcttgcagctcttcaaggctgacgccgtgagcccgtgcccaattgacccagtagtcggcatggttgagctccacacgaatgttgcgcatcagccaacggcgcgccatatcctccccaggatgacgggcaaacttggtcttggtcaggttctgcgccatgtacaaagcaaactgttccaccaccggccaaccaccaatgaggtagtggcgcatggtcttggcgctgagggcgttgtcacgcatgcgctgatacagttcgtgctcgacaacccgacgcttgctctcgctacagtcccggatcaattgctgcgcccaggcggggtaactcgaggcttccataagcgggccggttctgttgaatgtgtcgatcactgtggggctccttttcaagtgtgattgtacagaccagcaaatgtttcagcggaaagtgccgggcgccttgaataacagtggctgcggccgctcaggtcggcactgcaagctatcaaaggtaaacaattgcgggcgttcaatcaggtagccctgagcgtaatccacacctatctcaagtaaagcctgttcgatctgcggtgtttcaacaaactcggcaattgtgcgcttacccatgacgtggccgatgtggttgatcacttcgaccatggcgcggttaatcgggtcgtccagcatatcctttacgaaacttccatcgatcttcaggaagtctacaggtaaatgtttcaaatatgcgaatgaggacattccggcgcaaaagtcatcgagggaaaaatggcagcctaacgctttgagttcattaataaatcgaatcgcgctgcccaaattggctatagcgctggtttcagttatttcaaaacaaatcatttccggtggaatgttgtaagtatcgaatttctgacgtaaaaatcctaaaaagtcatcgtcgccaatggttattcctgacagattaatcgcacacatggccatgggtcggcccggacgctcatgcatgcaacgggcgataatcttgaatacgttttccactacccaacggtccagggacgtcatcaagccgtaacgttcggccgccggaataaaactgttgggcaaaatgatccgccccgcttcgtcatgcaggcgcaagagaatttcaatgtgcccattgccggcgtcggtagggcccaacggcgcaatttcctgggcgtagaggcaaaaacggtcttcctcaagggcaatatgcagccgctgtacccaggccatctcgccgaaccgcagagacaattccgagtcatcgacgtggtagacctgcacgcggttgcgccctttttccttggccatgtagcacgccatgtcggcggcgcgcagggaggtttccagggtggtcggggtttgcgagatatgcaccaggccaatgctgacagtggtcatgaagggccgccccttccacacgaagtgcaagctctgcacggtatggcgcaggctctcggcgattttttccgccaccggcgccgggcagttctccagcaggatgccaaactcgtcgccgcccaaccgagccaaggtgtcgccctcgcgcaggtccgactgcagcaacgcgcagatgtggcgcagcagctcatcccccgccgcatggccacaggtgtcattgaccagcttgaactggtcgaggtcgaggaacatcaaggcatgtcgcccgctttgctggcgcgcgacctgttgcagcacctgttcaagccggaactcgaactcacgacggttggccaggccggtcaaggcgtcgtgggtggcctgccaggaaaggttggcgatgtactgacgttcctgggtcatgtcgtgcaacaccagcaccgcaccgctgatcttgccagcgctgcggatcggcgcgcccaccagggtgaccgagaccgtgctgccgtccaggcgctggatcagcttggaatgctcgctgccgccgctgaactggcccttgacgatgtgttcaatcagggtgaagccgtcgggctcggcgttttcatccaacagcttgaacagcgccgccagcggcaggccctgggcctgctccgagcgccagtgggtcaacgcttcggctgcagggttcatgtaagcaatggccccgtcgacgtcggtggtaatcacgccgtcgccaatcgactccaacgtgatctgcgcccgctccttctctgcttgcagcgcatcggcaaaggcatgacgctgggccagcaacttgtgggtgcgcagcaacgccaacacgatcaggcccagggcggtcgccaggttggtgatcaacaacagccgcaggatcatccgcgaaccttcgcccagggcatcgctgaacgccttggcagcgggtgtcaccccttcattgatggccgtgatgcgcgccttccaactatggacatcatcatcgctgacgtagccggaggtaatggcgccgtgcatctcctgggccagctcatccaactgcaccaggtagccgtcgcccactgtccacagctcaatggctttttccaggtaactgaaatggcggaagttgaggtacagccagatcaggctggaaacgtcatccggatggttgccgcccttgagaatccccaggcgcgcggcctccatgtcgggattgggacggtccagggcaatgcgcaattcatgcccgccctggggcacggcaatggcctgctggtatttgaggtaggtggcgtcgttgcggttatcggcgtagagggtcaggtagtaaatggcgtctttctggcccttggaccacaggctttcgcccgccacatagccccgcactgccgaaagcacgtagagactgacgcagcctaacaatgcctggaacaacacgacggcgataaagggccagacaatacccagcaggcgtggcgttccgagagtccgcttttgcttcatgaagtcccttacacatgcacagcttgatacgcacgcgaaaatccgctcccgatagcacagcctaagctaaatcaacgcacttgttgcaagtgtccgtacagtttggcgtacagcccgccatcggcaattaactgctggtggtcgccatcttcggcaatgtgcccgccatcgaacaccaacactcggtcagcctgcttcaccgcagacagccggtgggcgatgatcagtgtagtacgcccgctgagaaaccgcgccagtgcctggtgcaggttgtactcggtcgctgcatccaatgcagacgtggcctcgtccagaatcaccactttaggctcggcgagcaccatgcgggcaatggccaggcgttgccgctggccaccggaaaagcgcacgcccgaacgcccgaccacgctgtccaggccaaaaggcagtgctttgacggtagcatccagttgggcgatttccagcgcctgccagcaggcttgatcggtgcgggtacggcccatggtcaggttggcgcgcacggtgtcgttgaacagcgccgggtgttgcagcaccaccgcgacgttctcgcggatggtttccaggccgatctcctgctgggtggcagcgccaaaacgaatactgccggcctggggcgtatagagccccagcaacagttgcaccagggtgcttttaccgccgccgctggcaccgacaatcgccaccttctcacccggtgcgatggccaggttcaactggttgagcaccaggtcttcgccgtagccaaagtcgaggccacgcacttcgatgccgacggtctcgcgcccgctgaacgggtctgcgccgcctgggtattgcggttcatcggcacgcgccaacagctcgttgatccgcgacagcgcgccccccgccgcgtaataggcgtattgcaggttcaacagttgttccaccgggccgatcatgaaccacaggtaactgaataccgcgagcatctggccgatggacaggtcggaaaacagcacggtgagcatggctgcagcgcggaagatgtcgataccaaactggaacagcaagccactggcgcggctcgacgcgtcggttttccactgggaatggatggcgtagtcacgcacttcctgggcacgctggcccaggcgcccgaggaaaaagccctggcggttgccggcgcgtacttcctggatggcatccagggtttcggtcagcgcctgggtaaagcgcgaagtactgtcgttttccagcttcttgaggtgcttgacgcgcttgcccaactgcaccgtggcgtagatcaccagcgggttgaacaacaggatcaacaacgccagttgccaatgcatccacaccaggatcgccgaggtgccgaccagggtcagcatcgctaccaggaaacggctgagggtttcgccgacgaatttgtccagggtgtccaggtcggtcaccaggtgggtggtgaccgtaccactgcccaggctttcgtactcacccagggagatacgcttgagacgctcgatcaggcgcacgcggatgcggtacacgatgtccttggccaagcgcgcaaacagccgcgcctgcaccacattgaacaccaacgcgccgcaacgcagggccagggtaaccaagagcatcaggccgatatagccagcggctttttgccaacccaggggcagcgcgtggttcattaccttgagggcggcatcgccatggcccagcagcacttcgtccaccagcaacggcaacaacagcgggataggcacgctgcacagggtggcgagcacggcgacgccgttggcgacccacagggatttcttgtggcgcagggccaggcggcgaatttctgcccaggtcaggcggtcggtgcgtggaggctgttcatacacaggcagctcgctccagccatcgacccagtaacggcgacagctcggacagcggctggtaaccattggtcagcaaggccaactggccattgcgctcggccagcagggtcgggaacccggcaatgcccaggtcctgcacccaagtaaaatcggccgccgtggccgcgtgctgatcggcacggtcgaactcgccggcaaactcgatgcgtggaataccggcctgctcggccagctccaccagcacaggggccagggtcacgtcccgcccttcgacatagaacgcgcgctggatcagccccagcagcgtccaggcgcaatccggcgccaagctgcgtgcggtgacgatagcgcggcacgcaggctcagtgtcgtagacaaacccgtcgggcaacgcgccctcacgcttgaacggctggccggtggcgtcggtgacggcttgccagtgttcaaggatgtagcgccgggtagtcggctccagcgccgcgccgctgccggtgcgcaagccgcccaccaccaggtgcacgtccacgccggccgcctgggcctgctctaccagcgcttgtgccaccggggcaaagccccagcaccaggaacacatcgggtccattacatagagcaggcgcgcagacatggctcagacctcggaaggggtttgcttgtagttgtaaccaatcgggtgcggcatattgcgggccttggccagttcgatctgcttctggcggtcgatcgcactgcgacgggtcttctccggcagcttatcccagcaatgggggcaactgatgccggccacataatgctcggaagcgcggtcttctatgctcaccggtgtgcggcaggcatgacattgatcgtagtcgccttcgctcaagtcgtggcgcacggtcacgcgattgtcgaacacaaagcagtcgccctgccatttggtttcttcctggggcacttcttcgaggtacttcaggataccgcccttgaggtggtagacctcatcgaagccttcgctgagcatgtagctcgacgccttctcacagcggatgccgccggtgcagaacatggcgaccttcttgtgcttggccgggtcaaagttggctttgatatagtcgggaaattcgcgaaaactggtggttttcgggtcgattgcgccttcaaaggtgccaatggacacttcgtagtcgttacgggtgtcgatcaacaatacttccgggtcgctgatcagcgcgttccaatcctgcgggtcgacgtaggtaccgacttttttgttcgggtcgacgccttcaacgcccagggtcacgatctctttcttgagtttgaccttggtgcgatagaacggctggtcgtcgcagtaggattccttgtggtcgatatcgaccatgcgcgggtcttttttcagccacgccatcaggccgtcaatgccttcgcggctgccggaaacggtgccgttgatgccttcttcagcgatcagcaaggtgcctttgatgccgttatcgaccatcgcctgcaacaggggctcgcgcagggcgacgtaatcttcgagggtgacgaacttatacagtgccgccacgacaatcggttgagtcatgggtgttctctccaggtggctaccctcgtaaggggtgaaccggatgcaaaaaaaacgcgccggctaagcggcgcgttgcggattctatcagggttaccccgtcaatgtccgccggcgcaggtcggcgaggccggggctgcgtcgattgtcgcccattcttcgggcgtataggtatgcagcgcaagcgcatgaaattcgctcatcaggctacccagggtggcgtagaccttctggtggcgcttgacgcgattaagcccctcgaactgctggctgaccagcacggccttgaagtgggtctgcaacccacggctgtgcatgtggctttcatccagcacgctcagatgttccggggccaggtcggcaagcgccgtttcgatacgctgttgcatggtcattcctgcttacttcttcttggccggtgcggcggcttttggcgccagctcgttggtcatgtcttccaacagcttgttcaccaccggtacggcgctttccagcttggcctgggtcatctgggccgattgctgggtcagctgcggcattttttccaggactttcttgccaagtggcgactggtagaacgctaccaggtccttgagctcggattcgctgaagttggtggtgtagagcttgaccatgtctggcttgagcttcggccagccgatggcctggtccagagcggcgttggccttggcctggtagctgtcaagtacggactgcttggcggcaggtgccttggtctgttcgaaacgctgggcgaacatttgctgcacttgcatgtacaccggggtccccagcttgtcagcatgggccagggtaaggaaggcttcggcactggcgttgtggctggcggtatcggcaagaacctggccgctggcgcaaaccagagcaaccgcggtacagatggcacgaagacgagtcatcgagtttccttttctagcaggcgaggtaagaccccaagggcgaccattctgcgcctaaaaaacctcgcggctcaaccccaccccatggcaagccccggtttcacggggcgcggtgacacaaaagcgcttttagggaacccacgctggccgccaaggcctaaactgaccaatcacgactggataaggagggtgaccgatgagccgtatcgaaaccgacagcctgggggaagtacaggtccctgatgacgcctattggggcgcgcaaacccaacgttcgctggtcaatttcgcgattggcgagcagcgcatgccgctggcggtattgcatgcactggccttgatcaagaaggctgcggcacgggtcaacgaccgtaacggcgacctgcccgccgacatcgcccgcctgatcgagcaggctgccgacgagatcctggacggccagcatgacgaccagttcccgctggtggtctggcagaccggcagtggcacccaaagcaacatgaacgccaacgaagtgatcgctggccgcgccaacgaactggctggcaacaaccgcggcggcaagagcccggtgcaccctaacgatcacgtcaaccgttcccagagctccaacgactgcttccccaccgccatgagcattgccgcggtgcaggcggtgaacaggcaactgctgccggcgatcgccactttgtccggcggcctggcggaattggccgctcggcatatgaagctggtcaagaccggccgcacccacatgatggacgccacgccgatcaccttcggccaggagctgtcggcgtttatcgcccagctcgattatgccgagcgtgcgatccgcagcgccctgcccgcggtgtgcgagctggcccagggcggcaccgccgtcggcaccggcctcaatgcgccccatggttttggcgaggcgattgcctccgaactggcggcgttgtcgggcttgccttttgtgaccgcgccgaacaaattcgccgccctctccggccatgagccgctggtgaccctgcacggcgcgctgaaaaccctggccgtggcgctgatgaagatcgccaacgacctgcgcctgctgggctccggccctcgcgccgggctggccgaagtcaagttgccggccaacgaaccgggcagttcgatcatgccgggcaaggtcaaccccacccaatgcgaagcgctgtcgatgctggcctgccaggtgctgggcaacgacgtgaccatcggcatggccgccagccaggggcacttgcagttgaacgtgtacaagccggtaatcatccacaacctgctggagtcgatccgcctgctggccgacggctgcaacaacttccaggagcattgcattgctggcctcgaacccgacgccgagcaaatggcccaacacttggaacgcgggctgatgctggtcaccgccctcaacccgcatatcggctacgacaagtcggccgagatcgccaagaaggcttacgccgaagggctgacactgcgcgaggccgcgctggaactgggctacctcacggatgccgagttcgaccagtgggtacgcccggaaaacatgctgggtagctgactacaccgccgtacgcagccgccgggccttgagcccggcgagcagcgagggtgccagcgccacggtcgccgaccccagcactaccacaaaggcgccgaaataccccagggcattgatctgctcagcctgcacatactccggccataaccacgccgccacggccaccgccacaaaagtcaccaagggcgtcaacgccagggtcgcactgacccgcgaggcctcccaatgcgccaaggcttcggcaaatgccccgtaggccaccaaggtattcatgcagcacgccaacaacagccagccttgcagcggactcaactgcaacgcctccagcggatgcgcccacggcgtgagcaacagcgcacacgacaggtagatcaccatcatcacctgcaatgaattccacaccgtcagcaactgcttctgccccagtgcataaaacacccaaatggtagtggcgagcaggatcgtcagcacaccggcggtgtaggtgcccatggacgtcagcaactccaccagacgttggttgaagaacaggccaaagcctgcgatcagcaccaccagccccaccccctgccccaggctgaagcgttccttgaacacaaacacactggctaccatcagaaagatcggccccatctgcaccaccaactgcgccgtgcctgggctgagcattttcaggcccaccaggtacaacacgtagttgcccaccaggccacacaccgccatgcccaccagccaaccacccttggggccaagcactttgcggctgggcaagcgtttggtagcggccaggtaaacgaacaggcaagtgcccgctaccatgaggcgaaaccaagtcacggtgatcgggtccatcacctgcaatacttgcttgagcttgatcggaagaatgccccacagaaacgcggtcagcagggtcaggaaaaaaccgtagacccagcggccggaagagatgtgcatgagtgccccggatgccagaggaagtggaacaggcattctaggggcaagtcactgagttcggatacgtcacagtcttgaatgggggagctggcttgcaagcgatggccataggcatctatataaatttcataggttgttgcagccaacggtaaccacgatgcgaagcgagccgctcttgatctggctcttgatctggctcttgatctgcttttgattttgatcttaagcgccccgttaaaccacgctggccgaacgcaggtttgaattcgtgggtaacccggcaggacgccgggttagccgccccgcgccatggatggcgcgtggcggcggcccacggattcaagcctgcgttcgggcacaccgagcctaggcgaggtgccgagtggtggggcaagagccctttggttactttggggcttttccaaagtgacccgccgtcaggcggaaccctaggtggccgttaccgcagaaatggatatgtactcgctattacagtgtcgcctgccaggccgccttcgcgagcaggcccgctcccacagttgggttgtggggtgtcagggagagaagtatcggctagtaggccgccatcgcaggcaagccagctcccacattagccctcccacactggcgctgttccaaacggagtcagcgcacggcttcgaaaagcccggtagcgcccatcccgccccccacgcacatggtgacaatcccgtaacgcaaattgcgccgttgcaactcgcgcaccaggtgccccacctgccgcgaaccggtcatgccaaacggatgcccaatggaaatcgagccaccgttgacgttgtacttggcattatcaatctccaggcgattacgcgcgtagaggcactgagaagcaaaggcctcattgagttcccacaggtcgatgtccgccacctgcaagcccttggccttgagcaacttgggcaccgagaacaccgggccaatgcccatttcatccggctcgcaaccggccacggtaaaaccccggaaaaaggccttaggcttgagccccagttccaaggctttttccaggctcatcaccagggtcatcgacgcaccgtcggaaagctgcgaggagttacctgccgtcaccgagccatcctcggcaaataccggcttcaagccgctgaggctcgccagggtggtgtccgggcggttgcagtcatcccggtcgaccacgccgtccaggatctgcaccgcgccagtgttcttatcctcgaccttgtacttgaccgccatcggcacgatttcatcattgaacaagccatcagcctgggcctgggcagtgcgctgctggctttgcagcgcgtaaaggtcctggtcttcgcggctgacgtgatagcgccgcgcaacgatttcggcggtctggcccatggggaagtaaatgcccggcacctgttctttaagcagcggattgatcaggttatcggtgttgacgctcttcatggtcaggctgatggactccacgccaccggcgaaaatgatgtcgctgcagcccgaagcgatctggttggcggcaatggcaatcgcctgcaagcccgaggaacagaaacggttgagggtcatgcccgccgtaccggtacccagttgcgaaagcaccgccacgttacgcccgatgttatagccctgggcgccttcgttggagccggcaccgacaatgcaatcttccaccgtcgccgggtcgataccgttgcgggccagcagcgcattgacacaatgggccgccatgtcatcgggacgggtctggttgaacttgccgcgaaaggatttggccaggccggttcgcacgctgtcgacgatcactacttcacgcatgggctacctcgatcttgtggttgtgggtcgaggatagagccgggccgggccgactgcgatgatcattcactgcgtggatgcaaaagcatggggcctctatggttctctgtaggagcgagcttgctcgcgaaaaactaataagcgccgcgttcactcaggaagcacgcgttatcgttgacgtttttcgcgagcaagctcgctcctacaggctatttctttttctttttgtcgtgcttgtcggttttatcaaacgcctcttccagcgcacggttgatggtgcgcagcaccttgacccgcgcccagcgcttgtcgttggcttccaccagcgtccagggcgccacctcggtgctggtgcggtcaaccatgtcgcccaccgccgcgcgatagtcgtcccacttgtcgcggttgcgccagtcgtcttcggtgatcttgaagcgtttgaaggggatttcttcacgggcctggaagcgctccagctgcgtctccttgtcgatggccagccagaacttgaccacgatcacccccgcatcgcgcagttgctcttcgaagtcattgatctccccataggcgcgcatccagtccgccggggtgcagaagccttcgatacgctccaccagtacgcggccgtaccaggagcggtcaaacacggtgaacatgccgcgcgccgggatcttctgccagaaccgccatagataaggctgggcgcgttcgtcttcgctgggcgcggcaatcggtacgatatggtactgacgcgggtccagcgccgccgccacacggcggatcgccccgcccttgcccgccgcgtcgttgccctcgaacacgctcaccagggcgtgcttgcgcatgcgtttgtcgcgcatcaggccagagaagcgtgcctgctcggtaatcagttgttcttcgtaatcgtccttgtccaggcgcagggtcatgtcgaggctgtcgagcaggctcttttggtccaccgaggccagcaacggcgccgggttcatgccgctggccttgaccttggcctgcttcagggcactttgcagcccatccagcaggatcttgcccacggtcagcccacggtaatgcgggtcgacaccttcgatcacatgccacggcgcgtaatcgcggctggtacggcgcagcacgcgctcaccgaaatgcacgaacttgtcgtaggtcttggactgctgccagtccaatgggctgatgcgccagctgtgcagcgggtcgtcggccagggccttgaggcgcgccttcatctgttttttggacaggtggaaccagaacttgaagatcagcgcaccttcatcgcagagcatcttttccagacgctcggcgccggcgatggcctggtccaggcgcgcatccttgatctgcccatgcacgcggccttgcagcatctggctgtaccagttgccgaagaaaatgcccatgcggcccttggccggcagttgccgccagtagcgccaggccggtgggcgcgccagttcttcgtcggtctgctggtcgaaggtgcgcacttcgatcaggcgcgggtccatccattcattgagcagcttgacggtttcacccttgcccgcgccctcgatgccgttgatcaggatgatcaccgggaagcgcttctgctgttgcagctcatactgaacctccagcaaggcttcccgcagggccggcacttcggcgtcgtaggtgtctttgtcgatggcgtgaccgatttcggcggattcgaacatgggcagctccgtttcaagatggctcaagactagcggattgggccaagacacgcgcaaggaaatacaacccagccttgccatggatcaattcaacgcctcctgatcggctagaatggccgccttgcctttgcccgctttcatttttctgagccgccatgaaccccatcacccacgcccagctcgactgggatgatcaaggccgcccgcattcgcgggtgttcgacgatgtgtatttctccgaccagtcgggcctggaagaaacccgctacgtgttcctggagcagaaccgcttgcaggaacgcttcgccgccttgccggcaggtgggcgcctggtgattggtgagactggcttcggcaccggcttgaatttcctctgcacctggcagttgttccaacagcacgcggtggccggtgcgcgactgcactttgtcagcgtggaaaaatacccgctcagccatgccgacctgcaacgcgccctcgccctctggcccgaactgcaacccttggccgagcaactgctggcgcaatacattgccatccaccagggtttccagcgcctggtactggacaacggccgcgtgaccctgaccctgctgatcggcgatgcgctggaacaattgccgcaactggacgcccaaatcgatgcgtggtttctcgacgggttcgctccggcgaaaaaccccgacatgtggaccgccgagctgttcgcccaactggcacgcctggcggctccaggttcgaccatcagcaccttcaccagcaccggctgggtaaggcggttgatcaatgccgccgggttcaagatgaaacgcacgccgggcatcgggcataaatgggagatcctgcgtggggagtttctcggctggcccgaggacgctcccgcgccagccccacgtaaaccctggttcgcccggcctcccgccatcgagggtgaacgtcacgccctggtcatcggcggcggcttggccggctgtgcgaccgccgccagcctcgccgcccgtggctggcgtgtcagcctgctggagcgccacgccggcctggcacaggaagcttcgggcaacccacagggtgtgttgtacctcaagctttcggcccatggcacggccttgtcccaactgatactcagcggttttggccacacccggcgtctgctggaacacttgcaccgaggcgtcgattgggacggctgtggcgtgttgcaactggcgtttgatgccaaagagagccagcgtcaggctcaattggcacacgccttcgctccagacctgctgcacctgctggaccgcgagcaggcgcagcaaaaggcgggaatcgaactggcccacggcgggttgttttttccacagggcggttgggtgcatccacccgcgctgtgccagtggcaggcgaaacatcccctgattgaagtgctcacccaccacgaggcactggaactgcaccggctcgacgaccagtggcaagcccgcgccggtgaccgcgtgctggccagcgccagtgtcgtggtgctcgccggggctgcggagatcaagcgtttccccttcagtgccgacatgccgctcaagcgcatccgtgggcagatcacgcggctggcgcaaaccccggcaagtaaggccctggccactgtcgtctgtgccgagggctacgtcgcaccggctcggcttggcgaacacaccctgggcgccagttttgacttcaccaatcaggacctcacgcccacgcccgccgaacaccacggcaacctgcagatgctgggtgagatttctaccgacctgctgcagcgcctgggtgctgatcgcttggcgcccgaacagctggagggccgtgccgcgtttcgttgtaccagccctgactatctgcccatcgttgggccactggctgaccatgcggcgtttgagcaggcttatgcggtactgggcaaagacgcccggcaagtgccgcaaacgccatgcccgtggttgccggggctctatctgaacagcggccatggctcgcgcggcctgatcactgcgccgttgtgcggcgaactgctggctgcttggctgagtgatgagcccctgccagtgccaaccagcgtagccgaggcttgccatcccaaccgctttgccctgcgggctctggttcgaggccaagccgcgccccgcaaagagaccgattgatggcaaagtggttagcggccttataacttatcggtctaaaactccacgcatagcactgggtcagtttctgggtacgcgcccgtttgggcgtattgagtgctgacccctccccaacggaaaaaccggtaaggaatttatgtgtggactagctggcgagttacgctttgatcttcaacctgccgatctggcagccgtagaacgcatcacccatcacctcgccccccgaggccccgacgcctggggttttcatgcccaagggccgattgccctgggccaccgccgcctgaaaatcatggacctgtcggacggctccgcccaaccgatggtcgacgcccatctggggctgtccctggccttcaatggcgctatctataatttcccggagctgcgccaagagctggaagccctgggttacgccttctattccggcggcgacaccgaagtgctgctcaagggctaccacgcctggggcgaagcgttgctgcccaagctcaacggtatgttcgcctttgccatttgggagcgtgatgcccagcgcctgttcatcgcccgcgaccgtctgggggtcaaacctctgtacctgtcgcgcaccggccaacgcctgcgctttgcctcggcgttgccagcgttgctcaaaggtggggatatcaacccgatcctggatccggtcgccctcaaccactacctgaatttccacgcagtggtccccgcgccgcgcacgctgttggcgggaattgaaaaactgccgcctgccagttggatgcgcatcgacgccagcggcaaaaccgaacagaaaacctggtggaccctgccctatggcccccatgaagatgaaaaacacctgaccctggaagactggaccgaccgcgtactcgacagcacccgcgaagccgtggccattcgccaacgtgcggcggtggatgtgggtgtattgctgtcaggcggcgtcgactcgagcatgctcgtgggcctgctgcgcgaagtgggcgtggaggatctgtcgaccttctccatcggttttgaagacgccggtggcgaacgtggcgatgagttccagtactcagacctgatcgccaaacactacggcacccatcaccaccaactgcgcatcgccgaaagcgagatcatcgagcaactgccggcagccttccgcgccatgagcgagccgatggtcagccatgactgcatcgccttctacctgctgtcgcgggaagtggccaagcattgcaaagtggtgcagagcggccagggcgccgatgagttgttcgccggttaccactggtacccgcaagtggacggcgcccgcgacccttatgcggcctatcgcgaggcgtttttcgaccgcagctacgacgactacgcggccaccgtcgcgcccaaatggctgaccgccaacgacgctgccggcgacttcgtgcgcgagcatttcgcaatgcccggcgccgacgcggccgtggacaaggccctacgcctggacagcaccgtgatgctggtagacgatccggtcaaacgcgtcgacaacatgaccatggcctggggtctggaggcgcgcacgccgttcctcgattaccgcctggtagaactctcggcccgtgtgccggcccagttcaagctacccgatggcggcaaacaggtgctcaaggaggcggcgcgccgggtgatccccagcgaagtcatcgaccgcaagaaaggctacttccccgtacccggcctcaagcacctgcagggcgataccttgaactgggtgcgcgagttgctgctggacccgagccaggatcgcgggctgttcaacccggccatgctcgaccgcttgctcaccgacccgcaaggccaactgaccccactgcgcggctccaaattgtggcagttggcggcgctgaacctgtggctgagcgaacaaggaatctgatcgatgaaaccgaatgccgcggcttacagccaacgcttactcaaaggccaggcgccgacctacgagcgcctgcaagcgcgcctggccgaagatggcagcgccctggccgccgacccgattgccgtgcattgcggctggggccggttgttgatcggccacacctttcccgacccggcaagcctggcccaggaactgctcaacgagcagcccggggagcgcgatatcgcgttgtacgtggccgcaccccagcagatcctgggcattgacccgcagcaactgttcctcgacccgtccgacaccctgcgcctgtggttcaccgactaccgcccggccacccgggtgtttcgcggcttccgcattcgccgggtgcagagcgaggccgactggcaagcggtcaaccacttgtaccaggggcgcgggatgctacccgtcgacccggagcgccttaccccacgccatcaaggcggcccggtgtactggctggccgaagatgaagacagcggcgcggtgattggcagcgtgatgggactcaaccatcacaaggccttccacgacccagagaatggttgcagcctctggtgcctggccgtcgaccctcaatgcacgcgccctggcgtcggtgaagtgttggtgcgccacttggtggagcacttcatgagccgaggcttgagctatttggacttgtcggtgctgcatgataatcgccaggccaagagcctttacgccaagctgggcttccgggcgttgaccacctttgcgatcaagcgcaagaacggcatcaatcaaccgctattcctgggcccggggccgcaggcggagttcaacccttacgcgcgcatcatcgtcgaggaagcccaccggcgcggcattgatgtgcaggtcgacgatgccgatgcgggcctgttcaccctcagccacggcgggcgtcgggtgcgttgccgtgaatccctgagcgacctgaccagcgccatcagcatgaccctgtgccaggacaagagcctcacccacaaggtgctcaaggccgcgggcctgcaggtgccggtgcaacagttggccggcagtgccgacgacaacctggagtttctcgacgaacaccagcgcatcgtggtcaagccgctggatggcgagcaaggccatggcgtcgccgtggatctgcgcagcatcgaagaggtgcagcaggcgatcgaagcggcgcgccagttcgacagtcgcgtgttgctggaaagcttccacgaaggcctggacctgcgcattctggtgatcggttttgaagtggtcgcggctgcgattcgtcgccctgccgaagtgatcggcgacggtcaacattcgattcgcgcgttaatccaggcgcaaagccgtcgtcgccaggcggccaccgatggcgagagcaaaatcccgctggatgcagaaaccgagcgcaccctcaaagccgcaggttacgactacaacagcatcctgccccgtggcgtgcaactggccgtgcgacgcaccgccaacctgcacaccgggggttgcctggaagatgtcacggcgatcttgcatccgacgctggtggacgcggctgtccgcgcggcccgtgccctggatattcccatggtcggcctggacctgatggtgcctgcggccgaccagccagagtatgtctttatcgaagccaacgaacgggccggcttggccaaccatgaaccgcaacctacggctgagaagtttgtggatttgttgtttccacacagtcagccagctacctgactaccgatcgttcccacgctccgcgtgggaatgcagcctgtgacgctctgcgtcaccacagcggacgcagagcgtccctgaggcattcccacgcagagcgtgggaacgatcgccctcaactcatcaggagtttccatgacccgaaccattcccgaacccgatctcccgtatctgcaaaaagtgctgctggaaatgctcgccattcccagccccaccggttttaccgacaccatcgtgcgctacgtcgccgagcgcctggaagaactcggcatcccgtttgaaatgacccggcgcggcacgattcgcgccaccctcaagggccagaaaaacagccctgaccgcgccgtctccgcgcacctggacaccatcggcgccgccgtgcgcgcgatcaaggacaacggccgtctgaccctggcgccagtgggctgctggtcgagccgctttgccgaaggcagccgtgtcagcctgttcaccgataacggcgtgattcgcggcagcgtgttgccgctgatggcttccgggcacgcgttcaacaccgccgtggatgaaatgccggtgagctgggaccatgtggaactgcgcctggacgcctactgcgccacgcgcgccgactgcgattccctgggaatcagcgtcggtgactacgtggcgttcgacccgctgcccgagttcaccgaaagcgggcatatcagcgcccgccacttggacgacaaggccggcgtcgccgcactgctcgctgcgctcaaggccatcgttgacagtggcgaacccttgctgatcgactgccacccgctgttcaccatcaccgaggaaaccggcagtggcgcagcggccgccctgccctgggatgtgagtgagtttgtcggcatcgatatcgccccggtcgcccctggccagcagtccagcgaacatgcggtgagcgtggccatgcaggactccggcggcccctatgactatcacctgtcccgccacttgctgcgcctggcgtcagacaacgagctgccggtgcgccgcgatctgttccgctattacttcagcgatgcccactcggcggtcaccgccggccatgatattcgcaccgcgctgctggccttcggttgcgatgccacccatggctatgagcgtacccacatcgacagcctcgccgccctgagccgcttgctgggcgcttacatcctcagcccgccggtgtttgccagcgatgcgcaaccggcccagggttccctggaccggttcagtcatcagatcgagcatgaaacgcaaatggagagcgacacccgtgtgccgtcggtggacagcctggtcggccagaagtcctgacgctgtgtgagttgatactggcaacaaaggtcccggcgcagtagcatcgccgggacctgatacctgaggcttgtatgctgattccctacgatgcacttgaagtcgacaccctcacccgcctcatcgaagacttcgtcacccgcgacggtaccgacaatggcgacgacacgcccttggaaacccgcgtgctgcgcgtgcgccaggcgctgaccaaaggccaggcgctgatcgtcttcgaccccgagagcgagcaatgccagttgatgctcaagcacgatgtgcccaagcacctgttcgactgaacagcggcgcctaagggttgggcgccggcacgggatgggtagcttggccctcgcctttgagtatcttgcggtacacctcggcgcggtacacgttgacgcccaccggcgcctcgatgccgaatttcacatgagtaccgttcacttccaggatatgcacggtgatgtcatcgccaatggcgatggcttcgcctgtggcacggcttaagaccagcatggcggttgtccttttccagtagcaggaccccgaccatgcccccttggcgctgggccggcaatggcttgcggaaaaatcaggcactgcctacgcaggcaggtaatttgtctgacagaccgcagccgaatcagcccttcacggcctgcgccttggcgcgcatcttgtcggccatcagtgtcatttcgtcatacagcagttgcggatttttctgtttcaacgcccaagccatgcggccttgctcgtggggcaggatcatgaactcgcctgcggccacgcgctggtaaatgtagtcggcgatatccgccgccgagatgggcgaactctcaagcagtttgcccacctgggccttcatggctggggttggcccacggaaggagtcgagcaggttagtctggaaaaacgacgggcacaccacatgaacgcccacttcctgttgcttgagctccaccagcaggctctcggacaacgccaccacgcccgccttggccacgttgtagttgctcatggccgggccttgcatcagcgcggccattgaggcgatgttgatgatgcgccccttgctcttttccagcagcggcaggaacgccttgcagcctttgacgacgcccatcaggttgattgcgatctgccagtcccaatcctccagggacaattcagcgaagaacccgcccgaggccacaccggcgttgttgacgatcacatcgatgccgccgagcttcacctcacaggcctgggcaaaggccgttagctggctgtagtcacgcacgtcacaacgctgggtaaaaccatcaccgcccgcctcgcgaacctgcttgagggtttcctgcaaaccgggctcgctgacatcggacaaccccaactgccagccttcacgagcccagcgcagagcgatttcgcgacccaggccagacccggcgccagtgatcatcatgcggttttgcataggaggtagccttgtggttcacgaagaagtgaccggcagtgtagcgaaggtttttgctccacccacgcaccatcagggtgatgaatgccccaggcaaaccgcgggctcggtagcagctgcgcgcatagactaagttcaatttttttcaactgattagttcaagttgcgcacgcgttaaaagaaataagcgacccatcaaaatgttttataaaaacaatgaattttctgcgaagtggcagagtcggaatgggtaaggcgtcccactgtacatggacgaaccaacggttaaacagccggtttttgcaaagaacctataaggaataaaaccatgagcctcattctgattattatcctgatcctcctgctggtcggtggcctgccggtgttcccgcactcgcgtaactggggttatggaccgtcgggtatcctgggtgtggtactggttgttctgctggtgctgttgttgctcggcaagatataaacgccgcgtttttgtaggagcgagcttgctcgcgaaacactcacaggcgccgggtttattcagaacgcacgcgttttcgttgatgtttttcgcgagcaagctcgctcctacaattgagaagcaaaaaaagaggccttctagaaggcctcttttttattgccggtcagttagtccggcttaccgtccaccacacctgcggtgttatccagcaggctcttggtcgcggtttgcaggaacgactcgagtttctgcttgagtgcggcttcgtccggcgactctggaatcaccttgccattcggctcggcgcccagggtgtattcccacaacttgggtggcatttccttgggcaataccagtacgcggtcgccggtgagcaaggccacggtctggtcgctgcccgatggcttgatcacgccgaaacctttatcaccttccggcaggttcagcaggtcacggccccagcactggtgcaaggtatcgccgcccaggcggcccatgatggtgggcacgatgtcgatctgggtgcccacagtgtggtcacgctcaccgaacttctcgcgcatgcccggtgcaatcatcagcatcggcacgttgaagcggcccaggtccatctcggtgatctgctgctcgttaccgaaaccgtggtcaccgacaatcacgaacagggtttccttgaagtacggctccttgcgggccttttcaaagaactggcccagggcccagtcggagtagcgcatggccgtcaaatgctcgttgaggctgccacggtcggtgactttctcgaccggcaatggggtcggcaacgcgtacggcgtgtggttggacagggtttgcagcagcgcgtagaacggcttgccgccttcgcgtgccttcagttcttccaggccacggttgaacatgtcctggtcggacacgccccaggtcgggtcggagaacaccgggttgacgaagtcattgcggccgatgaagttggtcatgccctggttgctgaagaagcccgattggttgtcccaggcgaaatcgccgttgtagacatacacatcgtcgaaatcacgcgcactgagcagctgcggcaggcccgacagcttgtggctgccttccggggtctgcatcaggtattcgaaacccggcaggttcgggaagcaggccatggtggcgaacataccctggtgggtgtgggtgccgttggagaagaagcggtcgaacagcaggccctcttgggtcagcttgtcgaagtacggggtgatattgcccggacgtcccaatgcgcccaccgagtgaccggcgaagctttccatcaggatgaccacgacgttcttgatcggcagggttttctcggccggtggcgtgaagtcacggcgtaccgcagcggtgtcggtgtctaccagcttctcttgcggcagcaccagcatgtcgcgcacggtctgggtggccagcggttgttccagagtggccttccagatgttggcgcggtcttcaccgaagcgcgccttggccgccgcgatcagcgacaaggtgccattgaggcccaactggttggcgaagttcgaatcggtggtgtagacatcaccccaacgcagcggtggcccctggcgcagggtgccacggatggcgaccacggcaaccagcaggcagaccatgaacaccgcggtgcggccgtaccacggcgccacctggcgagtgctgatcgtgccgccgctgaacgggccacgggggcgcgttgcgcggtcagcgcccttgaaggccatgctcaggatcagcgtgcccacggcccaggccagcaggtagcgcaccaccgggaaaccgtaccagagcatgctcatcacggttttcgggtcttccttcacatactgaaagaccaggccgttgaggcgctggtggaattcgcggtagaaatccatctccataagaccgaggaacagcgcaatgctggacacaacggtcagccacaaacggaagaagcctcgtgccgccatggcccgtacgctgaacacagccagcaacagcgggatcagcgcgtatgtcacaaaacgaatgtcgaagcgggtgccgttgacgaacgcttccaggaacgtcgaagccggcgtatccaggatcatctcgcggttgtagaccagcaacgccaggcgcagcagggagaacatcaccatcatgaccagtgcgcagagcagcgtgtacgccagatgggatttgacggtcggttgcagcaggcgatttgaagctcgctgctgattcagggcgtccgggtttgccatgtcgttttaggacccattggaagtttaagttgcgaaataatgcagtggcgtccgtccctcgcccaggctggctggggtaggcggttaacgcggtggcacaaatggtgcccgatcaaggccggcaaggctattaattactgaacgtaaggcacggccctgcctttaagggcactggagatagagccctggcagccggttaaagccggcgaattgtcttggatgggatgtgaaaatttcgtgcggcgaatagtttcgacacacaaatatggttaatacagtgcccccctgtgggagctggcttgcctgcgatagcggtgggtcagcttgcatcgttttgattgacacaccgcaatcgcagccaagccagctcccacattgactgtgcccactccaaatcgagtaggtcgtcagatccgcacgttaccgcgcggcccggcgatagcccagatgatcaggcccagcacgggcaacagcaggatcaacaggatccacagcactttggcgccggtgctggcgccgcttttgaacacgttgatgatcgcccagatatccagcgcgaggataatcaggccaatcaggctattaaacgtggaacccatggtgtcgctcctaagtgagggcatgcccttgtaggatagtcagccttggcgggggttccgttttatttcagacgtgtacggcaatcttcaaggcttcaagcgagggctcggccttgatgccgacttcggcacacagttccagcacccgcggcaggtcgttgccgaacaccagcaccgcctggatctcgtcgtccagcaactggctgaaattcaccagcacataaccgccgtcttccgggctcagggcgctaatctggatctggatgcggttcagcgcggtcaggtcttcggtcttggccagttgcttgggcttgaggttgaacgccacacccggaccgaacgacgcgacgatctgggcaaacaggtcgccataggtatcggcctggaacaacaccgtgtccggtaggctacccactaccacccactcccccagcgggatcgggaagctgtcgtcgtagttgatatccgggttggccgccaggaacgccgccggggccgcgtaggcctgggccgcttcgtcggcgatacgcgctacttcgtcctcacccatgacgccggcgctgattttactgatgagttcgacgagggcggttttcatggggcgatcctgtaacgggcaagttttgaagggcgcgtagcctacaccagtttctgcaactgcgccgccgtatccaccgcgcccatggtctgcgccgccgccagcgctgtcgcgccttgtgcatcggtggccttgggatttgcgcctttaccgagcaggtaatcaaccatgtcaacgcggttgaacatcgccgccatcatcaacgccgtacgcccgtccgaggaggccgcgtcaatcggcgtgccgccttcgatcaacgcctggaccaccggcaggttgcctttgaacgccgcaccggcaatcggcaactggttcttgtcgttggcgatcagggggtcagccttgaactccagcagcactttaaccgcctcggcatggccgtggtaagccgcgagcatcaacaaggtgtcgccattgtgattacgaaagttggccggcaggcctttggccaacagcgcggcgagcatcgcggcatcgccgcgacgggccacgtcgaagacttgctcggcaaattcggcggcttcgtcttcggtcatttgtttaggctgttctgacatgggggctccttgctgaggcgactgatataactgtttaaggcgcccagtgtcgcgagggagttccccggtgtcatggcttttttgtcaaaagccgccatagccagaatcaataacggaattggccgccctggatctgcgccagcaattgcccggtcaccggcacatagctgtccgaacccggcaaccaggcgtagaccgggtcattgccagccttgtccgggtcgaacccttgctccttgagcttcactttctggtacttgaacgtgccggtggtttccatcttcaccttgatccgcaaaaacaacggcaccgcataagggggcagctggccgtgggcaaattgcagcagttcgcgcatgtccaggctggccagggattcgctgggggtgatggcgaccatgccggcgcggccgttggtgttgtcgatctcgacgccataggccaccacttcagcgatctgcgggtgtttgagcaggacgttttccacctcggtggtcgagacgttttcgcccttccagcgataggtatcccccaggcgatcgacaaattgcgcatggccgaaaccgatactgcgcaccaggtcaccggtgttgaaatagcgatcgcctttttcgaatacgtcggtcagtaccaccttgcggtttttttccggatcggtatagccgtcgaagggcgacttatcatcaatgcgcgccaataacaggccctgcccgccggtgggcaccttgaccatgaacccatcgctgccgcgcagcggttcaccagtgtcatgggcgtaatccaccagcgcccaatgctgcaggcaaaagccgatggtgttgtcaaaattcagtatgttggtaaagccgatattgccgtcgctggcggcatacagctcgcagatatgctccacaccataacgctgcttgaactgcgcccacacaccagggcgcaagccgttgccgaccatcttggtcacctgattatcgcggtcctgcgcactggcaggctggtcgagcagatagcggcacagctcaccgacataacccagggtggtcgccttgaacttgcgtgcatcgtcccagaactggctggcactgaatttgcgccggatggcaaagcccgacgcgccgataatcgccgctccccagcacacgcacagcccggtggcgtggtacagcggcaaggtgcaatagaggacgtcctgcgggcccatgtccagggcgatactgccgaagctcacggcagttttggtccagcgcccgtgcttcatgatgccggccttgggcaagccggtggtgccggaggtgtagatatagaagcaggggtcattaaagaacacctgcgcggaactcaccgggttgtccaccgggctttcggcgctggcggccatcaggtcgatatagccatcgggcactgcactgccgggttgatcggccacgaaccaggtgcgctcggccgggatctgcacgtgttcgcgcaccgccgcgtaagcgcccagcaattcggcaccgaccacaatggcaaccgggttgaccagggtcaggctgtgtaccaacgccccttgagtttgcgccgtgttgagcatggcgcagatgccgcccagcttggccacggcgagcacgttgagcagcaactcggggcgattttcgataaacagcgccaccacgtcacccttgccgatgccctgggcttgcaggtggtgggcaagacggttggcgcgctgattggcgtcgcggtagctgatcacgctgtccccataaagcagggcagcaccgtcagggttgcgcaaggcggcttgttcgaaatgccagcccaggccgcagggttggcccgggtcggtgacgttggccgcgcgcatgccgcgcaccacccgtgggagggcccgaacgatggcaggcacctttcgcagcatcatgcgccaggtgatcatgtcgacttgctgatgagtcatggcgggacgtcccttttcttattcttggtcgggtccaggtacatcgactggtgtagcggaaaatacgtcagcggttctttggctgtacacgcgggatttgaaaagttttgtatctcgtggcggccggccgatgcttatctcccggacactccaccctccaaatgcgggagctggcttgtcgggccaccgcatcgctgcgataacagcctgccagccgagcgggatttttccgagcaaaaggcggtcagtatcagtacagccctccccctcctcccgaaaaaatcaccgagcagatagcgcaaaatgcaggatgcacgatggcccttcatgcaaattgcacgaaaatgaaaatcctgtaaatttataagttgctgatttataacgattttctaaaaaatccaatactggcacaatcactgcacctatcactccatgcttgccaacttgagccaatggagctgatagacatgagcctgatccaagataaattcgcttcggtattctccaactacgacgtcaccacccagccacgtccggacggcggcatcctgttgaccctgcgcaacagcgaaggtaagcaggtcaagcgctcgatctcttatcagcagctgcacactgccgaccaactgacctgggtcatcagcgccattcgtcgtgacttggctgaacaagccagcgaactgccgcagatttcgatgctgcaaagccagaaccgctttgcactgccgacctatcactcggcctaagctggaaatctgaaaaagggccgcgacgctactcagcgtcgcggccctttttcatgccgttaacataagccctggcgggcagcctcattctttgcctgtacacggttggtgacatccagctttccgtagatgttgcgcagatgaaatttcaccgtggcttcagaggtggcgcgaatctggctgatttcccagaccgtcttgccctcggaggcccatcgcaggatttccagctccgtggcagtcaggggcttgccgcacaagctcaggcgttttctgatagccgtcggtacaataactaacgggcgatacgtctcctctgggccactcattgttctctcctttatgtctgctgatgcgctgccacctttcggattcctcctattgacagatggcataaacattggcgctgaagagagagttacataacgagtggaatcaaagcgcacagtgcagaacaaacagctttgccctacaaataattaagcttcttcccacagcaacttccaacttgccagggttgaacattcagttatttgtgcttagtcatcgagtcctggaaagcgtgtggcaatcgcatcacaggtcaacgagggcacagcgccctgggctgtgttgaacaaacgcagtgtcacacagtgcgggttttcgcccatgtcgaaccagtgcggtacaccggcagggatgatcagcaagtcattcttctcacagcgcaagctgtacacatagtcgcctatgtgcagcgtaaacagcgcctggcctgcgatgaagaaacgcacctcgtcttcactgtaggtacgttcgtcgaggaactgcgcacgtaactcgtctttctgtggatggtcttgggtcacgctgaccacttccacagcggcgtagccgagggcttcgatctgagcctggtaggcggcaatcatttcagcatcagtggcgcccttttctatcaggctgggctgccagcgttcaaagcgcacaccgtgctcggccagggtcgactggatatcctcggcatgggtcaacactttgtttggggtgtccggggtggcgatggagtagacggctacatagctcattgcacggttccttggttcggctcttgcaatcgaaggccaatgataatggcggcggccagggccgcgaggctggcgatactgaacgtgaaggttggccccagcaggttccagctgtagccggaatacagggcgccgagcgcgccgccgatgccggccagcgcggcataaagggcctggccctggccttgctggcggtcgccgaagctgcgttgcacaaaggcaatcgccgctgcatggaagctgccaaacgtggcggcgtgcatcagttgcgccaccagcagcagccagaaaacctcggcaaatgaacccagcagccaccagcgcagcgcggccagcaggaaactggcgagcagcacccggcgcaccgaaaagcgcgcaaggatacggctcatggccaggaacatcagcacttccgccaccacccccagcgcccacagcaggccaatcacgccacggctgtagcccaagtgctccaggtgcaaggtgaggaaggtgtaatacgggccatggctcatttgcatcagcgccacgcaggcataaaacgccagcacgcctgggctgcgcaattgcttgaggaaaccctcaccggccaagcggttgccgtggctgacaggctgcgcgttcggtacccaaaggctggcgccgatgatgccggccatgatcaccacgaccgccaccgggtaaatatccaggctcagccaatcgaacagccgccccatgaccaccacggtgaggataaaaccaatggagccccacagacggatctggctgtagcgtgaggtttgcgtgtgcaggtgggccagggtgatgacttcgaactgcggcagcactgcgtgccagaagaacgcgtgcagggccatcaccagcgccagccaggcgtaggtcttgctgacgaaaatcaggcagaagctggccagggtgcacaccgcgccgaaccgcacgatggccaggcgccggccggtgtaatcgccgatccagccccacaggttgggggccacgcagcgcatcagcatggggatggccaccagttcaccgatgcgtgcgctggaaaaacccaggtgatcgaagtaaagcgccaggaacggcgcggtcgcccccagcagggcgaagtaaaagaggtagaagctggagaggcgccagtatggcagtggttggggcatgctattggggctgcttcgcagcccagcgcgagcaagctcgctcgccacagcaagcgcgctcattgccccaggcgatcacagctggcccagtatcggggtactcacgcgcacatcggcattttgcccacggttacgcaagaggtggtccatcagcacgatggccatcatggcttcggcaatcggtgtggcgcggatgccgacgcacgggtcgtggcggcccttggtgatcacgtccaccgggttgccgtgcacatcgatcgaacggcctggtgtggtgatgctcgacgtggccttgagcgccaggtgcgccacgatcggctggccggaagaaataccgccaaggatgccgcccgcgttgttgctgaggaaaccttcaggggtcatctcatcgcgatgctcggtaccgcgctgggagacgcaggcgaaaccagcgccgatttccacgcctttcaccgcgttgatgctcatcagcgcatgggccagttcggcgtcgaggcgatcaaagatcggctcgcccaggcccggcttcaccccttcggccacgacggtgatcttcgcgccgaccgagtcctggtcgcggcgcaactggtccatgtaggcttccagctccggcaccttgtccgggtcggggcagaagaaggcgttgtcttcgacgctgtcccaggtcttgaacgggatttcaatcgggcccaattggctcatgtagccacggatgacgatgccctgggtggccaggtatttcttggcgatggcgccggcggccacgcgcatggcggtttcacgcgccgagctgcggccaccgccacgatagtcgcgttcgccgtatttgtgatggtaggtgtagtcggcatgggccgggcggaacaggtccttgatcgccgagtagtccttggacttctggtcggtgttgcgaatcaacaggccaatggcacagcccgtggtgcggccttcgaacactccggagagaatttcgacttcgtccggttcctggcgctgagtggtatggcggctggtgccgggcttgcggcggtcaaggtcgcgctgcaggtcgtccaggctcagctcgaggcctggtgggcagccgtcgacaatggcgaccaacgccggcccatggctttcgcccgcggtggtgacagtgaacagcttgccgaaggtattgccggacatgcagggcgctccgtgaaatcagttgaatcaagtcaaccgtaataacttaaggcggccagtatacgcaggctaaccgactagttcatcctcgaaaccttaccggtagacgttggtccaaccggcacctctccaatgatggcgctatgatgctgcgagttctgctgttcaccctcaccctgttcaccgccgtggcccaggccgcctcccctgtcgtcttgcaacgcccgatcagcctggacaccggcagcggccaactctttggctcgctgctgttgccgcaatcggataaaccggtgccggtggtgctgatcatcgccggctccggccccaccgaccgcaacggcaacagcgccgacggcgcgcgcaacgacagcctcaagcgcctggcctgggtactggcccggcataacatcgccagcgtgcgctacgacaagcgcggcgtggctgcaagcctggcggccacgccggatgagcgcaacctgaccctggaggcgtatgtggccgacgccgtggcctggggcaagttgctcaaggccgacaagcgcatgggcccgctgattgtgctgggccacagtgagggcgcgctggtcgccgccctcgccgcgccgcaacttgaaccggccggagtcatttccttgtcaggtagcgcccgcccggtggaccaagttatccgtcagcaactggccgatcacttgccccctgccctgttgctgcgcagcaatgaaatcctcgatcacctcaaggccggccaggtggacgccgatgtgccgcgcccgctggagggtattttccggcccagcgtgcagccgtatctgatcagcctgttccgcgccgatccgtcggccgcttttgcacgcttggatatgccggcgctgattatccagggcaccaacgatatccaagtgggtgtaggcgacgcccagcaactgaagaaggccaaacccgacgcgcagttgacggtaatcgaaggtatgaaccacgtgatgcgcatcgtgcccaataacgtgaagcagcaactggcctcctacaacgacccgaaactaccgctggctgcggagttgggccaacgtatcgtcagctttatcgaaggacttcaaccccgttaagcggcaattggcctccagtcctggaaaaaacggccgataagtccagagtcgacagtaaaaagactgtcggctcgcagggcttggacaggatcgcgccgcatgacaaccaccgaaacaacacccgaatctaccgccgagaccccggccgcaaccgaagctgccgcggcagcagccctgccgtgggccgacgttcacgccgaacacttcaagatgctgcgcctggccccactggccaccgaccgcgccaccggcgcacggccattgcgctttgtgcagttcggctatgccgagcgtcatgacaaacaccacagcctgttgcgcatggtcatccagttaccgggccagcgagtacggcgcgagcagaatcatctggatatctgggtcgatcacgataaacaccgcgtgcacttcggccccggcaacagcctggaaatcgagccggccaaccgcggtatcgggcgtttcctggtggcccaaggcgccgcctgggcgaagaagaagtggtcacactaccgcgtcgacggcgtggacctggccaacaaggacgccctcaacgaagccacgcgcctgcgtcgcgatcacttcctgcgtatccagggtttcgatgtggcctacgccgatgtgcagcacctcaaaggcaatgtgcaaccaggcaaggtcggcgacgtgctggacagctggaataccgagaaagtgcagtttgtggagatcctcgaagccgcgcagatgctgcaacaggccgaccagaacctggcggagcaggaagtgaaactgcgcaaggaagaggagaaagtcaccaagttcaagcgtgaggacagtgggctgcgctttaccatcacctgcctggtggcgtttacggtgtttcaggcggggttgttgatctggattgccacgcaccgctgatagattgaaatgcaatcaaaatgtgggagctggcttgcctgcgatagcgatgtatcagtagcacaagtgcaagctgacccaccgctatcgcaggcaagccagctcccacattgaccgagtttctgcagttatatccgggcagcgaaaacggcctggtgttggcggcactgctcagccgtcaacataaacaccccatgcccaccgcgcttgaagtccagccaggcaaagtccacttccggatacagcgcctcgacatgcacctggctgttgcccacttcgacaatcagcaagcccttctcggtcaggtggtccgccgcttcagccagcatccggcgtaccaggttcaggccgtcgtcaccgcaggccaggcccagttccggttcgtgttggtattcgtcgggcatgtcggcgaaatcttcggcatccacgtagggcgggttcgacacaatgaggtcgaaacgctggccgggcaaaccgtcaaaaccatcgccctgcacggtgtagacgcgctcgtcgacgccatggcgctcgatgttctggttcgccacttccagggcttcgaaggacaggtctcccagcaccacctcggcctcggggaattcgtaggcacaggcgatgccgatgcaaccggagccggtgcacaggtcaaggatgcgtgccggcggctgggccagccagggttcaaagcggtcttcaatcagctcgcctatcggtgaacgcgggatcagtacgcgctcatcgacgataaacgacatgccgcaaaaccaggcttcgttcaacaggtacgcggtaggcactcgctcatggatacgccgatgcagcaagcgctgcacgtgggagatttcctcttcttccaggttgcaatccaaatagctgtcggcgatttcccacggcaggtgcaaggcgcccagcaccaattgccgggcttcgtcccaggcattgtcggtgccatggccaaaaaacaggtcttccccatggaaacggctgacagcccaacggatatggtcgcgcaaggtgcgcaggcgggaagtgatcacggggcaagctcctggaaaaaacgactggcgattctaacagccttcacctgtaccgacgatgtacgaaacacctggcaccgtacgtcggatttcatccaattcgcccgcattgtgttaaacaggcctgcctcttgacatggctgcacgccagcaacggcgtaccttacgatagtagcgattcacagaagcgctcagccagtggacaatgtcgcaaaagccccactcacaggagccccagaatgtccgttccaaagacgatgtttcaactcagcggtcgcggttacgcagcagccaacctcaatcatgcgaccctggtgatcatcgacgcccagaaagaatacctcagcggcccgctcgccctctcgggcatggactcggcggtgcagaacatcaagcaactggtgaccgcagcgcgcagtgccgggcgcccgattgtgcacgtgcgccacctgggcacggtgggcggcctgtttgacccccagggcgagcgcggcgaattcattccgggccttgagcctgaaggtgacgaaaccatcatcggcaaactgctgcccagcgccttccatggcaccggcctggaaaaacacctgcaagacctgggctccctggacctgatcgtctgcggtttcatgagccactccagcgtcagcaccaccgtgcgcgcggccaagaacctgggctttcgctgcaccctggtggaagacgcctgcgccacccgcgacctgccgtacaagggtggcatcctgagcgccgagcacgtgcagcaaaccgaaatggccatcatggccgacaacttcgccaccctggcgctggccaaagatctgatctgaccctgctggcggtgagcggcgtgtttattgctccgctcatccgcaaagccctttcatttggcgcatttacccctctccccggaacaacctgtgtatcttccggtcgaagggccgataccctggaggaaaggtcggaatgaagatatccgatggttttgatgctcgtcgcttgcgccccaaaggcccgagcaattggcgtctgcgcctggtagcgtgcattgccgcgttactggcgatagtaggtttgttgttggcgggcgctggtggcgccggcctgtttgggcattcgccggcactcggcgaactgaatgccagcccgggtggctcggcactcctgctgggtgtcggcttgctggtgctgtggttgggtgtgtggctgtggcgtcgcagccgtcggaaaatgcgccaaccgttgtcgttggatatcgcctctcacctgatgaaaaagcacgactgatggcgcttggatagcgtttcctgcgccctggccgccgcgatttaggtaaactgcccgcccttcgcggaggctgacatgcaagacgacgatttttccctgttcaaaaacgagctgcgcggcgtcaagccgatcaagcacgaccgcgccgacaccggcaaacccaagaccgaccgggcgcagatcgccaagctgcgccaggccgcgaccgtgcgcaccgatgccaccaccgtggatggcctgtcggaccagttcgtgatcgacgtcggccccgaagatgagctcatgtgggcccgcgacggcgtgcaggaaagccagatgcgcaagctcaaggccggccagatcccgttcgaaggcagcctcgacctgcacggtatgaccgtggaaaaagcccgggaaaccctctgggctttcctggctgaagcgaccaaattcgaaattcgctgcgtgcgcgtcacccatggcaaggctgtgcggctggacggcaagcggccgatgatcaagagccacgtcaacacctggctgcgccagcatgcccaggtgctcggttttacctcctgccaggcccgccacggcggtgccggcgcggtgtatgtgatgctcaagcgcaccatgatggaagggcgcgacgagtaacaagtgccttcgtcaggcttgcagcgatgtgtccgccaccgtaaccttgcgctttgcgaaaatcccacaggtagtttcatgtccctggaacagaattacacagagattctcggccaactcggcgaggacgtgtcccgcgagggcctgctcgacacgccaaagcgtgccgccaaggcaatgcagtacctctgccgcggttatgaacagacactcgaagaagtcaccaatggtgccttgttcagctctgacaatagcgaaatggtgctggtcaaggacatcgagctgtactcgttgtgcgagcatcacctgttgccgtttatcggcaaggcccatgtggcgtatatcccgagcggcaaagtgctgggcctgtcgaaggtcgcccgcattgtcgatatgtatgcgcgccgcctgcagatccaggaaaacctcagccgccagatcgccgacgccgtgttggaagtgacaggcgccctgggcgtggccgtggtgatcgaggccaagcacatgtgcatgatgatgcgcggtgtcgagaaacagaattcgtcgatgatcacctcggtgatgctgggcgagttccgtgagaacgcggctacccgcagcgaatttctcagcctgatcaagtaaccggccaggcaggaaaaaaccggcgttcatcgccggttttttttcgcctgtagaaatcaggtaagctgcgccccctcagtcatgggcaagaggtttcagccatgttcgtcaaagcacttagagtgggcctcggccacgtcatcatcgcgggcgactttcttacccgcccacgcaaaaaacaacgccctgccgagcaacaggccaaggtcaatgctgccgccaaagacctgaccctgtatcagttccacgcctgcccgttctgcgtgaagacccgccgcaccctgcaccgcctgaatgtgccggtggccttgaaggacgcgaagaacaacgaacaggaccgccagaccctgctggagcaaggcggcaagatcaaagtgccgtgcctgcgcatcgaagagaacggccagaccacctggatgtatgactccaaggtgatcatcgagtacctggacaagcgcttcgccgcaatctgaagcccgctgcggtcaatgtaggagctggcttgcctgcgatacgggcaccgcggtgcagcagatgtaccgaggtgatgctatcgcaggcaagccagctcccacatttgccctgcggtgttcttaagtctgtattgccagttcaagatccagcagtgccgagcccaggcacttgccgtgggcatccagcgccagtgagcgggtcacgccgccacgcaggatgcccggcaacacgaagttcagcgcctgcacattcgacaattcataacgccgaaccggctcagcaccgggttccagtaaatccgcgaagaacgctgccacgcgctccgccgtcagctgttcacacagcaacgggtagtcctgcgcgcggtaggcaatgatcgagatgtttgacgtgtcgcccttatccccggtgcgggaatgggccagcgtatgcagtttcattcttcaatcctcggtttgaccgcttcacggggcagcagcaacgacgcgaccgccaccacctggcgtacgcccttgctcgccccaccgccgccggccgggccgttggtgtagagggtctccacttcattgccgatccgcaccgcgtcgccacgctcctcacaccgggcggcgacccgcaggcgcacttcccaaggctcgacgctgctgcgtgggccgtgcagtgaatccatgccgatcaactcggcgcgcaggtcctgcatctttacgccgatcaacgcgagacgcttgagtaccacgtcccgcgccaactcggcccgtgcgacagcacctggaccgccgtaggacatctgcccctcaccgatccaaccgtccagataaccgacgctgaccttcagttgatcaggccgggcacgcccactagctccctgggcacgcacccggtccacgccctcctcgacaaaccccacctgggaaaagtcggccgtcacatccggggtcaagtaggctgccgggtcgtgaacttcataaatcagttgttcggcgcaggtcgcgcggctgacccgtccaccggagcctgccaccttggtgatcactgcattgccgtcggcgtcgacctcggccaggggaaagcccaggcgtgccagatcctccacatccttgaagccgggatcggcgaagtaaccgccactgacctgccccgcgcactcaagtaaatgccccaccaacgtgcctcggcccagtcgcggccaatcatcgaaggcccagccgaactcgaacatctgcggcgccaggaatagcgaagggtcggccacgcgcccggtgatcaccacatcggcgtcggcacgcaacgcttcaataatgccctccacacccaagtaggcattcgcggaaatcagccgcttacccaatgcccccacggtcttgccgttatccagcaactgctcggcaggcaaggcgtgcagcacgtcatcgccgaccacagccaaaaccttgaggcccaggcccagctcgcccgcaatacgccgtacttccctggccgccgccagcgggttggccgcgcccatattggtgatcacccgcaggcgtcgacgccccgcccgctgccccacaaagggcaagacacggcgcatgcgctcagccagcagcgggtcataaccgccctgcgggtcgctgatacgcgcctgttgcgccagggcgatggtgcgttcggccaggcattcgaagaccaggtaatccaggtcgccgtgttcggccagttccacggcaggttctatacggtcgccggagtagccggcgccggagccgatgcgcaaggtgttcatctcaaatcactcccaggagcaacgccgtcagggtcatcaacaccgaggcggcaaacaggaaaggaatggtgaagcgctggtgatcggccagttcgatcttgcacaggcccaccagcaggaaggtcgcaggcgtcagcgggctgaccgggaagccggtggtgtgcacgcccagcagcgaagcctgggccacctgaagcgggtcgacgcccagggccttgccgacttcggcgatcaccggcatcacgccgaaatagtaggaatcggggtcaaacaacatgctcaggggcatggacaaaaagcccacgacggccggaatcaacttgccgtggcccgccggaatctgcgccaccgccacttcggcgatggccttgagcatgccggtgccttgcatgatgccggtaaatactccggcggcgagcaggatactggccatggtcagggcggttttcgcatgggcgtcgatgcgcgcacgctgggcgtccacgttgggatagttgatgcacaacgcaaccacggtgccgagcatgaacatcaccaccgggtcgacccagccggcgatcatcaccaccatcaccagcacggtcagcatcaggttgacccagaacaaccgtggacgacgcagcgtgatgtcgtcatcgctgagcactcgttgcggcaccgcctccacgctggaaccggcgcccaggcccaggcgcttttcttcgcgatggcccagccaccaggcgcaggcgaagacaaagatcagcccgacgatctgaaccgggatcaatggttggaacaggtcggccaccggcacatgcaaggccgccgacgaacgcagcaccgggccggtccagggcaggaagttgacgccggcggccatcgcacacacgcaggctaggatgcgtttatcgatgccgaggcgcgtatacagcggcagcatcgccggcaccgtcaccagaaaggtcaccgcgccagagccgtccaggtgcaccagcaacgccagggtcgcagtacccaccacaattcgtgtaggacgcgtcccgaccgtacgcaggatgcgatcaataatgggatcgagcatgcccgcatcggtcatgatcccgaaaaacaggatcgcgaacacaaacatgcccaccacaggggcgacgttcttgataccggtaatgatgaaggcgctggtttgcaggccgaatccaccgatcagcgcggcaatgatcggcaaggcgatcaaggctaccagcggcgagaggcgcttgctcatgacggcagcgagcaggcacaggatggtgatgacacccagggttgcgagcatgggttactccagggcggcctcgttggccggttattgttttccctggagtattggaatcgcgctaggctttgtaaattgcaatattcagccatcagcgttcggaaaaacaaaatgaagcggcgcttatgaaaaacagcatccagcacattcaagccttccttgcggttgcccgcacaggcagcttcaccaaggcggccaacgaattgcatctgtcgccgtcagccctcaccgtgcaggtgcaacaactggaagactggctcggcgtcgccctgctcgaccgcagcccgcgccacgtgagcattaccgccgcaggccaggacgcgcgcgggcctatggaaaaactgctgttggacctggacaacatcgtcaccggctcccgcgacctcgccgccttgcgccgcggcgtggtgaccattgccgccctgccctcagtctgcgcaggcgctctgcccccggccttgcgcctgtttcgccaacgcttcgccggcatcgaagtgcgcctgcatgacctggtggcccagcgcattcatgcaaaggttcgcaacggcgaagtggatttcggcatcggcgtgcgcgctcgcctgagccacgggctggacttcgtgccggtgctcaatgatcggctgtgcgcatttgtaccatcgggccatgcgctcgcccgccatcgccaactgactctggaacaattggcggaccagccgatcatcctgaccggccgagacagcagtgtgcgcgagcaagtggacacgctgttcgatgagacacgactgacgctgaacgccggcatggaggccaactacatgtcgaccgtattggccttggtgcgccagggcctgggcatcagtgtgttgccggagtcagcggccgatagcctggaaggtttgaagcggatcagcatcgatcatcccggggtgaatcgagagatcgggttgatcagccgtagcggcatgggcttgagcccggcggcgcagcgctgctttgaactgctcaacaaagcactgcctgacgcgccgccgcgctgaatgtgggagctggcctgcctgcgatgcagacacctcggtttagccggagcaccagggtgacgctatcgcaggcaagccagctcccacattggaccgagtgaatcagtcgagcatcggcacataccgaggatgactggccacccgctgcaaccatgcctgcaccgccggatacggcgccaggtcaaagccgccttcatgggccacatgggtgtaggcatacaatgcgatatcggcaattgaaaactgctcgcccactaaataaggcgtggcttgaagctgacgctccatcaccttcaaggccttgtaaccgcccttatgggtggttttatattcttccagccgatcctcgggcatgttcaggtaaaactgaataaaccgcgccaccgcaatgtaaggctcatggctgtactgctcgaaaaactgccactgcaatacctgggtacgcaggcgcggttcggtcggcaggaattcgctgccatcggcgaggaagttgaggatcgcgttggactcccacaggcaggtgccgtcttcgagctccaataccgggaccttgccattggggttcttggccaggaactcaggggtctgggtatcgcccttgagaatatcaatatcgatccattcatacgggatgcccaacagagtgagcatcaatttgaccttgtagcaattgcccgacttgtaatcgccataaaccttgtacatggggctccccttttcgccgcgctgaccgaatgcttgcgcccacaaggtgcgggtatcgagggcttgtttcaaggcgtcgcgcagaataaatcccctggcgtgggcctttcatcccttttcgcccagataatcgaaaacattatttgctttatttgtatacaaaagcataattcgcttcgtgcgagttcctgaccttttggtcaacaaacccgccaacacctcaaagcgccgttgcccactcatgtaaccggcgctggaaataacaataaaacgattgaggagtactcgctgtggatagccgcaaaaccgaagcccctacgttggacctggccgcgccccgaggcggttggctggaacgcctgttcaaactgcgcttgcatggcaccacagtgaagaccgagctgatcgccggcctcaccacttttatcaccatggcctacatcatcttcgtcaaccccaatatcatggccgatgccggtatcgatcacggcgcggccttcgtcgccacctgcatagcggccgcgctgggttgcctgctgatgggcctgtacgccaactggcccgtgggcctggcgccgggcatgggcttgaacgcattcttcacctacaccgtggtcggcaccatgggctacacctgggagaccgccctcggcgcggtgtttatttccggcgtgctgttcatgatcctcacgctgtcgcgcatccgcgaatggctgctcaacagcattccggtcagcctgcgccatgccatgggagccggcgtgggcttgttcctaggggtgatcggcctgaaaaccgccggcatcatcgtcgacagcccggccacgctgatcaagctcggttccctgcacgagccggcaccgctgctggcggccgtgtgtttcctgctgattgccatcctcagttatcaccgcgtcttcggcgccatcctgatcagcatcatcgccgtaaccctggccggctggggcctgggcctagtgcactacaacggcattctcgccaccccaccgagcctggcaccgacttggatggcaatggacgtgatgggtgtgttcaatgtgagcatgatcagcgtggtatttgcctttctttttgtacacatgttcgacactgccggtacactgatgggcgttgcgcaacgcgcaggcctggtgaatgccgatggcaagatcgacaacctgtctcgcgcgttgaaggctgacagtgcgtccagcgtgtttggcgccatggtcggtgtaccgccggtgaccagctatgtagaaagcgccgccggtgtggctgctggcggccgtacgggtttgaccgcagtgaccgtgggcgtgctgttcgtggcggcgatgttttttgcgccgctggccggcatgattcccgcctacgcaacggcgggcgcgctgatttatgtagcgatgctgatgatggcgagcatggcccatatcaattgggatgaggccaccgacagcattccggcgatcgtcaccgcgatcatgatgccgctgacgttttcggtcgccgacggcatcgccctgggctttatcacgtatgtggcgttgaaggccggcaccggtaaataccgcgagatttccatcagcctgtgggtactgtgcgcgatctttatcgccaagttcatcttcctgtagttcgggaacggctgaaaaaccgcctcaccttcgggtggggcttttgcatgaagggaggactgtaaatgaccttggaaacctggctgctgttcagtggcgctgcactggtggtgatcctgattcctggcccgctgtcgctgttgatgatcagcaacagcctcaactacggcctgcgccgctcctaccctgcgtttctgggcggcgtgttcgcctcgatctgcctgttgagcgcctcggccctgggccttggcgcgctgttgctggcttctgagcaattgttcagcgcattgaagatcgtcggcgcgctgtacctgttctacctcgcctggcaaagctggcaacagtcgcgccagccaagccagggtgcacaagtaccgcagaccccggccgtgccgcgctttcgcgccttgtttggccgtgcctttgtactgggcgccagtaaccccaaggacattctgtttttcgccgccttcctgccgcaatttctcagcgcccagcaagcctttttaccgcaactgctgatcatgatcgccacctggacggtgctcgacctgctgtgcaagctggcttacggcctcggcgcccatggcgcagcgcggtatttgcgcagcggcgccggccagagctggttcaaccgcgtcagtgcggccctgttcggttgcgccggcctggcctcgctgatgaaggtcaggggttcagtttgatgaagtaaaccgtgggcgagacatcgctcccggtcggccactgaatacccgccaggatccgtaccaggcgctgttgacgcatggcactgctgacttcgtcagctaacgccacgttggtataggtcctgagcccggtcacaagccaattgtcgcttaacgtcgaaaaaaggcgcaaagacggcctttccgcccacaggtatgacacgtaataaagccgagatggtgagttggggtgggtggccagcgtctcccgccggatcgtcccgtaacgccgcacattgacatgcctgagggtgaagccctgttcctcaagcaacgtactgaccgctgcatattgggcggtatttctttcgctcgcgactgccttgccaccgcgacgcagggtgcgtggcggcctcacaggtggcaggaagtcaatacgggtcaagcccggcgcagcgccctggaagcttatgaaggtcgtgttgggtgccctgtcggtaggccgcaacatccgcaataagtcatcggtgcggccaggccgcacgggggccggcggcaaccattcgtccagggttgcacgcactctgagcagatgcgtggcagttgccgggcgcgccggacccgacaattcgatcaagcggctcaccacatgatctcgggtcctgttggtaagggtgggaaaggcgatggccacggactgctccaacggccggtcgaaaatcggcgcatgcaaatgccaggcgcccgttgccgtgcgggatgcaggtaacggctgttcgagcaggtcgttgctggtccaacgcaggatgtcaacgctggccaatgacaccagcggctcattcctggtgatgaacacgataccgtgaagcccggcatcctcacctgggggcagcaaccggtaaaaacggctgctcggatcggtcaggctggaacgttcaggcgcaacacgcagcacatggtgaggatagccttgagggtccgctgcgacatgaaatatccctggagcgggcgagctcgatagctggcctggatgaagctgagtctgccaatccaaccaatgcgtggctgtggtggagaactggcgaatcctgtcttcgctcgctacacgcaccggcggttgccagtccgacacgtcaggcctcggaggttgccacggccgatgggttcccgaactcggccccggagttggcgcgtccgcgcccaataaccattcttcgggctgatagatatgcacgagcaactcatcttcttcgcctgcctgtttgtttttcaggcgtaatgagtgttcgttctggcgccggtacaccggataacgatgcgtgtcatccgccaggaaggcctcgccatttttgacgtacacacccttttcacccacgcccttcagcgcgacagcgtcttgaggcacgccctttagccgaaaatgctccagggctttgagctgggtaattggccgtgatatcccagcggccagtgttctgggcgccgtcatgtgcaggtggcggattcgactcaacccggtggccagcgaacgccgcgtgattcctcccacggcgcccgccctggttttggcgccgggtataaaacccaataacagttcaaccgtcagaaaaatgctcatgaagccaacatcaaccgcatccgaggaacggccaaaacggtggtaccgccgcgccgccagcagcaactcgtagaagtcgttgaccatgccgtaaggcggcacgaaaaaacccaccaaggcgcgcatgcgcgtatcactttgctcctccaggcgtttggttcgatagcggtccaatgccttgctggaattgcacgccgcctgggttcggcgctgcaaatcaagcacccaggccttgtacagcaacgcgttggcatcgctgtgggcagtgggcacgatcgccagcgcgttcagcgggtcagtatcgacctgctcctggaactgcttttcaatgtcctgcggcaccggcgtcggctccagatgcttgaccgcaaaggagcgaatgaacttcacgccccgccacacaccggaaaagaacgtggcccgcagcagttcgtccagcgtagcgtcgggctcggcatcatgggtgacggcctcgaatgcccagcccggtgcgacctgccgcgccagctgtttggcgtgctcggcctgggtcgcgatgcgattgagcgccacgtgcgcctcttgcacgctggcgtattcggtaacggccaaggcagtggcagcgttcggccaatacactacgcagcgcccattggcctgatcctgcatgaccacaatgccggcgatgtagcgatcatgctgcagcgtgtgccccaccagatgcaccactgacaggctcagtcgatggccattcttcagcaagtcctctggcgttcgcgcggccatcgctgtattgaacaggctttgcgcgggtgcactcagcccctggcggatggccgaatacagccgtaccttggcacagtcgcgcaacatgcgctgcatcagttccggaatacggccttcgctcagcccttgggccgcaggctcaaacgtgcgctcgatctttgctgcgtattgaccgccgatatccagcgcggagattgtcttgatcaggtagtccgcatccagccgtctgcgccagtccggctgcaggtaggtggcgtggttcaagcgcttgcgcgtccagggcgcttgcgggtcgaggttatggagcgccagttgcagcaggctgaaagtgctgcgctcaaggctgggggtctgaatttccttgcgatcgcccggtgtgcagcggctttcataaccgcagaaactgctggcgacgtcgtccggcatagtcagtaagggctgctcgatatccagccccggatagaaaccgtcctctgttaaacgggcgatcaaggcagtgcgggcgaaggtctccaggtcttccagacgctgctcaagccggttttcaaccgcgaggacgctggccaagtgtcggccctgcagtttcttgaagatcttgcgctgggcgctcgacgcgcccgccagccatgccggcagctttttcgcatcggcggtggctttgcgcagtacatcaagatgggcctggctctgctcaagcagatcattggccggtactttcagatgttcgcccagttctatcagcagtagatcacggctgaacgcagggctcttaacctcaccgaaaagctgcgtcgcgtccgccgagcttgtgtgcaaagccccatagtgcttcatcagttttttgaacgaaaactccagaggccctttttcgatcagctcgtagcgcactgccaaggtgcctcgcgcggcatgcttgcgtaggtcttgccgtacctttcgctcgatgcacctccagagcactgactcatcactgctgttgaaactggccaacaggcttttagtcagggcttgcagactggaaaaagacagcaccccgcccgattgtccaaacccacatagcaccaccgggaccgagcggccaggcttctcaacggccgtcgctgtggtcaccaccatcaggttatgcacgtggtagaacgcatccggcgcactgcccaccgaaaccgacaagacgcgtgcgtcaccgtattcacgcttggcggcctggtgctggtccactatcttgatcaccaggtctcgatgtgccgtgggtatcagcttgagccggtgctgcaattggacctcgcagcgcaaggcctcgccttgagcctgcaaaaacagggtggcgcgcttttcggtctgggtaggacgttcgatccagaacccatactcatacagccgtttctgcgcaccgctgctcagtgagtccatggtttgcgcatgctcctggagctcgcgcgcgagggccacaacctcctgaaattgcgtggtatcgacgctgggatcagccacatcgagtaacgcgagcaagcccttttcgtagcgtttgagccgagcatgcatcgcgagcatgggttggccggacaaaagattggcaaagcagatttcccgtcgccgacgccgcgcatcccattccagcaacgacttgcctgatgcacccagccgcgcctcaccgaccaattgctttctggcacgttcgataaacgtcagaaaaggcgcagccgtcagcggctgaggcggcggccgtcgttgggaatataggtggctctgattgatcgccaacgcacaggccaattcattttcccactggccgtccaacagcgcttgcgcgctcaacgccaacgcatccccgtccagtaccgaaccacgggcaacactgctcgccggggtgtagtgcgtgggccggcaaagttcatggcggcgcttgagcggcaggcactgccaaagctcgtcgaacaacgcctggctggtcagtttcagcaggccgcactgcaggaagaagaagctcggatactcataaaaattgcgcgctacacccggcaggtagatcacatgcggcacatcactggggtcatccgcacgatagatgtgcaaggcgccggggatcgctaccgcgggtgagccgggccacatcaattggctggcgcgcacactggcccagtcgcccccggcccgctggcgagcttcggggctcggcgcatcgatcagcgcctggaccaggcttgacgcctcactcgacagctcgcccaactgccccgcgataaaggcccgatcagcgaacaactcggcctgcaattggcaccagtgttcctgacgcgtctgccaggagccggccaccagtgtttcccagtagcggctgaacgcgggggccagacgttcgaacagcttcatcgcgagtacttgctgcagcacctgcaagggcgtcaacggccacacacgggccggttcatccttgacgctcagcgtggtgaactgattgaggttgattggcacggcaggtagcgccagcgagagcagcgtccgttccgtcagggtgtcgaccctgtgcagtgctggcggcggcatggcttgggtgaacagtagtttgtccgggtcgatgtcgaacgctttgcgcagtgctgcgcgaatcaccttcaagactttgggcgcgcgtaccgtcaaatgcatcagggctttggttgtgttggcgcatcgttggtcggcaaggccgagctggttgatcaggcggctgggctgcgggtggctgttgatccgtcgtgacagttggctgcgcatttgctgtatggacgcttgcgcagtggggtcggtcgtgtcgatgggtggggccatgatgttttcttaacctgaggaaaacacccagcctaggcacgccactgacgcaacaggcgttagatagttgaacaaacgccaggcaaaaaaaagcccgcagtgtgcgcgggcgaaaccaacgaagagcatttgggggtgtgaagcgaggtgacgactcagctaccgcgataagtggagtagctgtaaggcgaaatcagcaggggcacatggtaatggtcctgttcggcactgatgccaaagcgcagtaccaccacgtccagaaaagccggctcgggcaactgcaccccacgggcccggtagtaatcaccggcgctgaactgcagttggtacacgccgctgcggtagtcctcgccttgcagcagcggtgcgtcgcaacggccatcgctgttagtggtggcggtagcgaccagctccagctgcgcgccttcgacgcggtacagctcaaccttgatggcgctgccggggcagccgtgcgcggcgtccaaaacgtgtgtggtcaaacgtcccatggcttttatgcgcctcccgaagtcagtcatagagaaacccgcactctttcagggcagtgaaaaagccggcgatggctgattaagacatttttctaaaaaattgtacacaataaattcaacagccttccaaccccctgtaggagcgagcttgctcgcgaaaaacgtcaacgatgacgcggactatcaggattaaaagtggcgccctcaggtttttcgcgagcaagctcgctcctacagtgggctttttcatcttaacctgaccacttaggcaagtttcttgcagacagaccgttcagaaaaaatgcagaaatgcaggcttacaaagtttgcgataagttgtatacaatcactcatcgctgtgacgccactcagtcattccactgcccggccgccacacatttgctaccacgaacaagaaggaagactgcagtgagcgctgactacccacgcgacctgatcggttacggcagtaaccctcctcacccccactggccgggcaaggcacgcattgcgctgtcgttcgtactcaactacgaagaaggcggcgagcgcaacattctgcacggtgacaaagagtcagaagccttcctctcggaaatggtctcggcccagccgctgcaaggcgagcgcaacatgagcatggagtcgctgtacgagtacggcagccgtgccggcgtgtggcgcatcctcaagctgttcaaagaattcgatatcccgctgaccatcttcgccgtggccatggccgcccagcgccacccggatgtgatccgcgcaatggtcgaggccggccatgagatctgcagccacggctaccgctggatcgactaccagtacatggacgagacccaggagcgcgagcacatgctcgaagccatccgcatcctcaccgaactcaccggtgaacgcccactgggctggtacaccggccgcaccggccccaacacccgccgtttggtgatggaggaaggtggcttcctgtacgactgcgacacctacgacgatgacctgccctactgggaacccaacacccccaacggcaagccgcacctggtgatcccctacaccctggacaccaacgacatgcgcttcacccaggtgcagggtttcaacaagggcgatgactttttcgagtacctcaaggacgccttcgacgtgctgtacgccgaaggtgccgaggcgccgaagatgctttcgatcggcctgcattgccgcctgatcggccgcccggcacgcctggcctcgctcaagcgcttcattgaatacgtcaaaggccatgaccaggtgtggttcacccgccgcgtggacatcgcccgtcactggcaccaaacccacccctgcacgggagcggcgaaatgactgcgttccaaacccttaaaccctcgaccttgagccgcgacgcattcgtccaagccttcgccgatatctacgaacactcgccatgggtggccgaaaaggccttcgacctgggccaggatacgtcgatcgaccagatcgaaaccctgcaccagcgcatgagcgatatcctgttgagtgctgatcacgcctcgcaactggcgctgatcaatgctcacccggacctggcaggcaaagccgccgtccagggccaactgacccaagccagcaccgatgaacaagcaggcgcgggtattcaccaatgcacggccgaagagttttctcgcttcaccgagctgaatgaggcctacaaagccaagttcaagtttcccttcatcatggcggtaaaaggcagcaaccggcatcagatcctcgccgcgttcgaaacgcgcatccacaactctgcagacgctgagttcaagtgcgcgctggacgagatcaacaagatcgcgttgttccgcttactgaccctctagcagtccatccccagccactctatctaaggcagacaagaagaatgaaagcttacgccgtacctttcgagaagttcgtcaacctggccgacgcccgcctgggcaccaagatcctctcggtgaccgatgactggttcgctgacgccaaccgcctgttccagccgaccccggccgtgtggaaggagggcgttttcgatgacaacggcaagtggatggacggctgggagtcacgccgcaagcgcttcgaaggctacgacagcgcggtgatccgcctgggcgtgccgggttcgatcaaaggcgtggacatcgacacttcattcttcaccggcaacttcccgccgtcggcctccctggaagcctgcttcctggcctcgggtgagccggatgccaatacccagtgggtggaagtgctgtcagccgtcgagctgcaaggcaacagccaccactaccacgagatcaacaacgaccaggcgttcagccacctgcgctttaacatctacccggatggcggcgtagcccgtctgcgtgtgtacggtgtgccgttccgcgactggtcctcggtgggcgacaacgaacaggtcgacctggctgccgcgctcaatggcggccgtgccctggcctgctccgatgaacacttcggccgcatgagcaacatcctcaacccaggccgtggcatcaacatgggcgacggttgggaaaccgcgcgtcgtcgtacgccaggcaatgactgggtgattgtcgccctgggccacccgggcgagatcgagaaaatcgtggtcgacaccctgcacttcaagggcaactacccggacacttgctcgatccagggcgccttcgtgaaaggcggcaccgacagccagatcgaaacccaatcgctgttctggcgcgaattgctgccggcgcagaagctggaaatgcacgccgaacacaccttcgccgagcagatcaaagcgctggggccgattacccacatccgcttgaacgtgttcccggatggtggggtgagtcgcctgcgcgtcctgggcaaagtcgccaaataacacccgatcgtccccacgctctgcgtggggatgcaccccgtgacgcttcgcgtcacacagcggacgcagagcgtccagggcagcgttcccacgcagagcgtgggaacgatctatagacaagacaagaagacagccatgcgcacactgatgatcgaacctttgaccaaagaagccttcgcccccttcggagacgttatcgaaaccgacggcagcgatcacttcatgatcaacaacgggtcgaccatgcgctttcacaaactggccacggtcgaaaccgcgaagccggaagaccacgccatcatcagcatcttccgcgccgacgcgcaggacatgccgctgactgtgtgcatgctggagagacacccgctgggcagccaggctttcattccgctgctcggcaacccctttctgatcgtggtcgcgccacttggcgatgaacctgtatcaggcttggtccgcgccttcgtcaccaacggcaggcagggcattaattaccatcgcggcgtctggcaccacccggtgctgacgatcgaaaagcgggatgacttcctggtggttgatcgcagtggcacaggcaataactgcgatgagcattttttcaaagaggatgagcggttgatcctcgccccccaccaataagagaaggtctgatcacccgacaacaagggtgacaggcgagaggtaaagactgtggaagcacatctgttggaatggctgaacctgagcgtgcgctgggttcacatgatcactggcgtcgcctggatcggcgcttctttctacttcgtctggctggaaaacaaccttaatcgcgtcaaccccaagaacggcctggccggtgacttgtgggcgatccacggtggcggtatctaccacctggaaaaatacaaactggccccgccgaccatgccggacaacctgcactggttcaaatgggaagcctatttcacctggatgtcgggcgtcgcgctgctgtgcgtggtgttctacctcaaccccacgctgtacctgctcgcccccggcagcagcctcagcggcaccgaaggcgtgttgctgggcatcggctcactgttcgccggctggttcatctactcctttctgtgcgactcggccctgggcaaacgccctgccctgctcggcttgatcctgttcgtgctgttgattgcggcggcttacggcttcagcaaggtattcagcggccggggtgcctacctgcacgtgggtgcggtgatcggcacgatcatggtggggaacgtgttccgcatcatcatgccggcccaacgcgcgctggtggcggccatcgccgagaaccgcacacccgacccggcgctgccggccaagggcctgttgcgctcacgccacaacaactacttcaccttgccagtgctgttcatcatgatcagcaaccacttcccgagcacctatggcagccaatacaactggctgatcctggccgggatcgcggtggcggcggtgttggtgcgccattacttcaacacccggcatgacagccagaagtatgcgtggaccttgcccgtgggcgccttggcgatgatcagcctggcctacgtgaccgggcccaaaccggctgaaccgattgccaaggcaccggctgccatcgagtaccaacccctgccggaaactgcattgggcggtggcttgaaacccgccgcgcctgccgcacccgccgctgaaccggcaccggcccaggccaccacggacttcggccaggtgcaccacgtgatcgagcaacgctgcaccgtgtgccactcggccaagcccaccagcccgctgttcagcaccgctccggctggggtgatgttcgacacaccggcacagatccagcaacaggccgcgcgcattcaagcgcaggccgtggccagccagatcatgccgctgggcaacattacccagatgacccagcaggagcgggatttgatcggcacctggatcaaccaaggggcccgtaccaactgactgtttcacaccgttcccatgtgggagctggcttgaagattgagtttcatccggcaattgaatgccaaacaacacaaaaataaaaagattcgaggtgttgcatgtcccagttagaaacgcagactcctgccgcgcccgccatggtgcggctgcccctcttgcaattgattctggtaggcctgcaacacgtcttgctgatgtacggcggtgccgtcgccgtgcccctgatcattggccaagccgccggcttgagccgtgaagaaatcgcctttctgatcaacgccgacctactcgtagccggtattgccaccatggtgcagtcgttcggcatcggcccgatggggatccgcatgccggtgatgatgggcgccagttttgccgccgtgggcagcatggtcgccatggccggcatgcccggtatcggtttgcagggcatctttggcgcgaccatcgccgccgggttcttcggcatgctgatcgcgccgttcatgtccaaggtggtgcgctttttcccaccgctggtgaccggtacggtgatcactgccatcggcctttcgctgtttcccgtggcggtgaactgggccggcggaggtagcgccgccgccacgtttggctcgccggtctacctggcgattgccgccctggtgctgggcactatcttgctgatcaaccgcttcatgcgcggcttctgggtgaacatctcggtgctgatcggcatgggcctgggttacgcgctgtgtggcgtgatcggcatggtcgacctcagtggcctggcccaggcgccatgggtgcaggtggtaacgccgttgcactttggcatgcccaagttcgagttggcgccaatcctgtcgatgtgcctggtggtggtgatcatttttgtcgagtccaccggcatgttcctcgccctgggcaagatcaccggccaggaggtcacgccgaagatgctgcgacgcggcctgttgtgtgatgccggcgcgtcgttctttgccggcttcttcaacacctttacccactcctccttcgcccagaatatcggcctggtgcagatgaccggcgtgcgctgccgctcggtcacgctcatggccggcgcgttcttgatcgtgctcagcctgctgcccaaggcggcctatctggtggcgtcgattccacctgcggtactcggcggcgcggcgattgcgatgttcggcatggtggcggcaaccgggatcaagattctgcaggaagccgacatcgccgaccgccgtaaccagttgctggtggcagtgagtatcggcatgggcctgatccccgtggtacgcccggagttcttcgcacagctgccgttgtggatgagcccgattacccacagcggcatcgccatggccaccctcagtgcgctgtcgctgaacatcctgttcaacattctcggcggcgctgagcgccccgaagtcgcacatacgcattgattcctttgttagtacaaaaataacaacaaacagggaacacccacatgcacaaccttgacatggggccggccacacgccgcgccccattcttgcccctcgcgctctgttacagcgcacttgagcccaggcctgggagccagtattctccgcgcccgctcgaatcgactcaaaaaaaaacagcgaatgtaaaagctgacctcaaggccaacttatcccggcctgatgtttgctgccaaagtgcacaaaagccccctgaattcgactgcatccgctgcagccgacggggattttttggctttttgaacaccttggcgcagctcttgctaaaagcatcaaagctgaccgaacagacgatttttgcagcgaaccaaaaggcgccacaccagagcgcctgcgtagaagaaaaaccataaaattttaactcgggagcaaccgaatgaaacctatgttcaaaggcctgatgctggcaggatcactgttggccggtggccaagccgtagccggtgacttgttgcagtggcaaaacaacagcctgacttacctgtggggcaagagctttaccgtcaacccgcagatccagcaaaccgtcaccttcgaacatgccgacgcgtggaagtatggcgataacttcttcttcctagaccgtatcttttacaacggcaaggaagacggcaatgtcggcccgaatacttactacggcgagttcagcccgcgtttgtcgttcggcaagatcctggacaaggacctgtcgttcggcccaatcaaggacgtgctgctggccttcacctacgagttcggcgagggcgataacgagtcctacttgctgggcccggcattcgatttgaacattcccggtttcgactacttccagctgaacttctaccagcgccagaccgaaggcaatcgcccgggtgacggcgtgtggcagatcaccccggtgtggtcgtacaccattcccgtgggtaattctgacgtgctgatcgacggcttcatggactgggtggtggataacgacaagaacgcccgcggcacttaccacgccaacctgcacttcaacccacaggtcaaatacgacttgggcaaagccttgcattggggcgacaagcagttgtatgtgggttttgaatacgactattggaagaacaaatacgggattgaagacagcggcgctttcaagacgactcaggacacggcaagcttcctggtcaagtaccacttctaaaggttgatcgcggttccttgtgggagctggcttgcctgcgatcgcggtgtgtctgtgccagcagtgttggctggcataccgctatcgcaggcaagccagctcccacattcagttcggcgtcaggccgaggaaacgggtgatttcttcgcgcttggccaaggcatccttgcgccccagttcgatcaactcgctgcaataccccgcctcgaacaacagataactcaacacccccgcgccgctggtcttggtcgccccaggcccccgcaaaaacacacgcagtgccgccggcaattcctggcgatgtcgcgcggcgatttcatcgatgggctggctgggggcaatcaccagcacctccactggcgccaggccctggaccgccgcatccacaggcacgacgcggctgaactggttcaagcgctccagcagctcgatatcgctttccaggctgtcaatgaacgtgctgttgagcatgtgcccgccaatttgcgccagggtcggttgctggccggtgtaagtgcgttgcaccgaaggttcattgccccgagggttgccactcacccccaccaccaacacgcgactggcgcccaggtgcaaggccgggctgatgggggcggactggcgcaccgcgccatcgccgaagtactcctggccgagtttgaccggggcaaacagcagcgggatcgccgaactggccagcaggtgctctacggtcaattgggtgggcacaccgatacgccgatggcgcagccaggcatcaatggtgccgccgccctgatagaaggtcaccgcttgcccggactcataaccaaacgcggtcaccgccaccgcctgcaaatgctggcgacggatcgcctcgtcgatgccgccaaggttcaagcgctcttgcaacaagtcgcgcagtggcgagctgttgagcaatgccaccggcacctggctgcccaggcccaaaaggctatggatcaggaaacgactggcctggcgcatcacccccggccagtcactgcgcagcacctggtggctgcgaaagccctgccagaaggacgtcagccgttggatggccgcggaaaaatcgctggcgccactggccaggctcaccgcattgatcgcaccagcggaggtgccgacgatcaccggaaaaggattcgctgcccccgcaggcagcaactcggcaatcgccgccaacacccccacctgatacgccgcgcgcgccccgccgccggaaagaatcaaacctgtgaccggttccgctgggcgcattgcgtcactccatgtgagaaggggttggggttatcgacggcgcttttcgtacaacttgggctcacccggtggccggctcttgaaccggcggtgcgtccacaggtattgctcggggcattcgcgcaccgaggcttcgacccactggttgatgcgcaggcagtcgacctcgtcggtttcacccgggaagtcggtcagcggcgcatggattaccaggcggtaaccgctgccgtcagccaggcgctcctgggtaaacggcaccaccagcgccttgcccaggcgggcgaacttgctggtggcggtgacggtggcggcctggatgccgaacagcggcacgaagatactttgcttggcgccgtagtcctggtctggcgcgtaccagatggcccggccggcgcgcagcagcttgagcatgccgcgcacgtcgtcacgctccacggccagggagtcgaggttatggcgttcgcggccacggcgctggataaagtcgaacagcgggttgccgtgttcgcggtacatgccgtcaatggtgtgcttttgccccagcagcgccgcgccgatttccagggtggtgaagtgcagcgccatgagaatcacgcccttgccttccaactgcgcctgcgtgaggtgctccagcccttcgacatgggccaggcgcgccaggcgcggcttgggccaccaccagctcatggccatttcaaagaaggcgatgccggtggaagcgaaattttccttgagcaggcgtttgcgttccttggcggatttttccgggaagcacagctcaaggttgcgtgccgcgatacggcgacgatcaccggccacacggtacatgcccgcgcccagcaggcgaccaatggtcaacagggcccgatacggcaattgagtgaccagccacagcaggccgagccccagccatagcagccaaaaacgcgggtgaagaaatacagctcgaaaacgcgggcgatccattacagattccggtaaagacaagggccgcgcattctacaacggttcgactcggcttgcggcgggtgagtgttctcgttataagtctcgacacttttcgtgacaagccgctttcgccgaccatgagccaaaccgaaccgctagaccaagatcccgtgttccagctaaaaggcagcatgctcgccattaccgtgctggaactggcccgcaatgacctcgacgccctggaccgccaactggccgccaaggtcgccctggcgccgaacttcttcaacaacgccccgctggtgctggcgctggacaagctgccggctggccagggcgtgattgatttgcccggcctgatgcgcgtatgccgttcccacggcctgcgcacactggcgattcgcgccagccgcatcgaagacatcgccgccgccatcgccattgaactgccagtactgccgccgtccggcgcccgcgagcgtgcgctggagccattggtcggcgaagaaaagaaaaaaccggaaaaaccacccgagcctgcgatcaggcctacaaagatcatcacctcgccggtacgcggcgggcagcagatttacgcccagggtggcgaccttgtggtggtctcctcggtcagcccgggggcggaacttcttgccgatggcaacatccatgtatacggcccgatgcgcggacgcgccctggccggcatcaagggtgataccaaggcgcgtattttttgccagcagttgaccgctgagctggtttccatcgcgggtcagtacaaggtttccgaagatttgcgccgcgatccactgtggggcgcttcggtacaggtcaacctgtcgggcgatgtgttgaacatcatccgtctttaacggatactgccgcattttccaagcatctctagactctgatagcaaagcgaaaccggcaagacttgtgtaggactttttggaagttggtgtttccccatggaaacctcggctttttcctgcaaaggctgtccgcctgcggcgagtttcaagagatgtttttcagggaccgaaagtcctttttccttaggggtgaaacaccttggccaagattctcgtggttacatccggcaagggtggtgtgggtaagaccaccaccagcgccgctatcggtaccggcctcgctctgcgcggccacaagacagtcatcgtcgacttcgacgtcggcctgcgtaaccttgacctgatcatgggctgcgagcgtcgcgtggtgtatgacttcgtcaacgtggtgaacggcgaagccaacctgcaacaggccctgatcaaggacaagcgccttgagaacctgtacgtgctggccgccagccagacccgcgacaaagacgcgctgaccaaagaaggcgtgggcaaagtcctcgccgagctcaaggaaaccttcgaatacgtagtatgcgattcgccggccggtatcgaaaccggtgctcacctggcgatgtacttcgccgacgaagccatcgtggtgaccaacccggaagtgtcctcggtacgtgactcggaccgcatgctcggcctgttggccagcaagtccaagcgcgccgaagaaggccaggacccgatcaaggaacacctgctgctcacccgctataacccggagcgcgtcaacaacggcgaaatgctcggtgttgaagacgtgaaggaaattctcgccgtgaccctgctgggcgtgatcccggaatcccaggccgtgctgaaagcatccaaccagggcgtaccggtgattctcgacgaccagagcgacgccggccaggcgtacagcgatgccgtggatcgcttgctgggcaagaccgtggaacaccgcttcctcgatgtcaagaagaagggattcttcgagcgtatctttggaggcaactaaacaatgaaatttctcgacttctttcgcgccaacaaaaaacccagtaccgcatcggtcgcgaaagagcgtctacagatcatcgtggcgcacgaacgcggccaacgcagcaccccggactacctgccagccttgcagaaggaactggtcgaggtgatccgcaagtacgtcaatatcggcaacgatgacgtgcatgtcgccctggaaaatgacggcagctgctcgattctggaactcaatatcaccctgcccgatcgttgatcgaacgggcggtcgccacggcggctctgctacctggccctgtactgctgtaggagcgagcttgctcgcgaaaaacctgagaacaccgcgtttaacctcaatgaacgcagtgccgataagttcttcgcgagcaagctcgctcctacagggtgagggggcggtcagtggagccgccgttggtgtttgttacgaggctgtttaatgccgctgtccaatatccatatcctgcatcaggacgacgctgtcctggtggtgaacaagcccaccctgctgctctcggtgcctggccgcgccgacgacaacaaggactgcctgatcacccgcctgcaggaaaacggctaccccgaagcccgcatcgtccatcgcctggactgggaaacttcggggatcatcctgctggcccgggacgcggatacccaccgcgaactgtcccgccagtttcacgaccgcgaaacagaaaaggcctacaccgccctggcctggggccaaccggcactggacagcggcagtatcgacctgcccctgcgctacgacccgccgaccaagccccgccatgtggtggaccatgagttcggcaaacatgcgctgaccttctggaaagtgctggagcgttgcggcgactggtgccgcgtggagttgacaccgatcaccgggcgttcgcatcagctgcgcgtgcatatgttgtccatcgggcatccgttgctgggtgatggcttgtacgcccatgaacaagccttggccgcctggccacgcctgtgcctgcatgcaagcatgctcagcttcacccatccgcaaagcggcgagcgcctgcgcttcgagtgcccagcgcctttttgaagggcggatgcggtcaaatgtgggagctggcttgcctgcgatagcggcgtgcaagccaatacatcttgcacagaaagaccgctatcgcaggcaagccagctcccacagggtttggtgtggttctcgaccctgcacgctcactccaaatatctggccaatacggtaaactctcgccactgctgtctggagctatttatgcgcgaagcgttgaatcaaggcctgatcgacttcctcaaggcctcccctactccttttcatgccactgccgccctggcccagcgcctggaagccgccggctaccagcgtctcgacgagcgcgacacctgggccaccgaggccaacggtcgctactacgtgacccgcaacgattcctcgatcatcgccttcaagctcggccgccaatcgccgctgcaagatggtatccgcatggtcggcgcccacaccgacagcccgtgcctgcgggtcaagccccagccggagctgcaacgccagggcttctggcaactgggtgtggaagtctacggcggcgcgctgctggcaccctggttcgaccgcgacctgtccctggccgggcgtgtcaccttccgccgcgatggcaaggtcgagagccaactgatcgacttcaagctgccgatcgccatcattcccaacctggccattcacctcaaccgtgaagccaaccaaggctgggcgatcaatgcccagaccgagctgccgccgatcctcgcgcagtttgccggtgacgagcgcgtggactttcgcgccgtgctcaccgagcagttggcccgcgagcatgggttgaatgccgatgtggtgctcgactacgagctgagtttctacgacacccaaagtgccgccgtgatcggcctcaatggcgactttatcgctggtgcgcgcctggacaacctgctgtcgtgctacgccggtttgcaggccttgctcaccagcgacaccgatgaaacctgcgtgctggtgtgcaacgaccacgaagaagtcggttcctgctcagcctgcggcgccgatggcccgatgctggaacagaccctgcgtcgcctgctgcccgaaggtgaagaattcgtacgcaccattcagaaatccctgctggtgtcggcagacaacgcccacggcgtgcatcccaactacgccgagaaacacgacgccaaccacggcccgaaactcaacgccggcccggtgatcaaggtcaacagcaaccagcgctacgccaccaacagcgaaaccgccgggttcttccgccacctgtgcatggcccaggaagtgccagtgcagagcttcgtggtgcgcagcgacatgggctgtggctcgaccatcggccccatcactgccagccacttgggcgtgcgcacggtggacatcggcttgccgacctttgccatgcactcgatccgcgagctgtgcggcagccatgacctggcgcacctggtcaaggtgctgggcgcgttctacgccagccgcgatttaccctgagaccgaggcgcgcccattgcgggcaagcccgctcccacatttgatctgtgaatgcatttcagtgtgggagcgggcttgcccgcgatgggtttccaaacagatgtaaggctatctgactcacatcaactgcacttctgccaatccggcctagacttgtcagaacttccagtccgacaaggccgcccccgccatgatctcaatgtcctccttccacgccatgctgatccccatcgtgatcggcatgatcatgctcgcggtcggcttcaactttcgtgacaagcctctgggcgtgtttggcatgtggatcggcatgctgttgatccttggcaccgtgctctacaagatcctcgccaaactggcgcagtgacaaatgcgctcgcattgggcatagcggcctcgtacactcggtcaattcgtcgttttcaaggttgaccgcctcgtgttctcccgtctgtttgccctgccctgctacctgctgatcgccctgctcacgctgctgccagtgatgcccgcccaagccgtgggcttgcccgggatgctgggcggctccagcaagacccaaccccaggcggaagtgcccctggggcagtcgctggacgaagtgatcaaaaccctggaaaacgaccagcaacgcacccagttgctcagcgacctgaagaaactgcgcgccgccacgcaaaaggcccagcccgccgccgaactcggggtactcgggttgatcggcagtacgctgtcgggctttgagcagcagttttccggcgccgacagcccgttggggcgctggtccaatgaagtcgacctggccaaggatgaactggccgccctgatgttgccggccagcgaatggctgccaatcatcttcggttttgctgtgatcctggcggtgtggagcctgctggccgccgcgttgatctggctcagccaccgggtgcgcgagcgcttcggcctgcccgaagagctgccccagcacccgcgcacctgggacatgctgcgcttcgccctgcgcaagctgggcccatggctgatcgccctggtgatcacggtgtacctgagctacgccctgccctcatccctgggtaaatcgttggccatggtgctggcctatgccttggtggtcggcacctgcttctcggccatctgcgtgattgccttctccgtactcgacggcccgcaccgccaccgtgccctgtatatcctgcgccatcaggcgttccgcccgctgtggtggatcggcagctttgccgccttcggtgaagccttgagcgacccgcgcctggttgccgcgctcggccagcatctggcccacaccgccgcgaccgtggccaatgtcatggcggcgttgtccaccggggtgtttatcctgcggttccgccgtccgattgcgcacctgatccgcaaccagccgctgtcgcgccgactgacccgccgcgccctcaccgatactctgtcgatcatcggcaccttctggtacatcccggctcttctgctggtgggcatctcactgttcgccaccttcctgtcggccggcgacaccagcaccgccctgcgccagtcgttgctgtgcacggtgctgctggtgttgtgcatggtgatcaacggcctggtgcgccgccacgccctcaagccgcaccgcgggcacaagcgccatgcgctgtattccgagcgcctcaaaggctttgtctacaccctggtgcacctggtggtgtggctggtatttatcgaactggggctgcgggtctggggcctgtcgatgattcgctttaccgaaggtgaaggccatgaaatagccgtaaagctgttcggcctcggtgggaccttgttgtttgcctggctgatctggatcctcagcgacaccgcgatccaccacgccctgacgcgctcgcgcaaaggactggccaacgcccgcgcgcaaaccatgatgccgttgatccgcaacgtgctgttcgtgaccattttcatcatcgccgccatcgtcgccctggcgaacatgggcatgaacgtcacgcccctgctggccggcgcgggtgtgatcggtatcgccatcggttttggtgcgcaatcgctggtggcggatttaatcaccggcctgttcatcatcatcgaagactccctggccatcgacgactacgtggatgtgggcggccacctcggcacggtggaaggcctgaccatccgtaccgtgcgcctgcgcgatatcgatggcatcgtgcacaccatcccgttcagcgaaatcaagagcatcaagaactactcccgggagttcggctacgcgatcttccgcgtggcgatcccctacaacatggaaatcgacgacgcgatcaaactgatgcgcgaggtcggccacgccatgcgtaacgacccgttgcaacgccgcaatatctggtcgccgctggagatccagggcgtggaaagtttcgagtccggcagcgcgatcctgcgcgcacgtttcaagaccgcgccgatcaagcagtgggaagtgtcgcgggcgttcaacctgtcgctcaaacggcacctggatgaagccgggctggacctggcaacgccgcgcttgagcgtgcaggtgctgaccgccggcagcgtgcaggagaaagatccacaacaataagcaaggagaggttggtatgcgaatgaacggtcttacacaccaatgggttttggggttgctcggcgcggttgcgagcagtgccgtggttgccgccagcagcggccaggacagtgcccgggaggaaattgccgcccaggcaaaaatcctcgaacccagcctgttggaaacccgccgcgatatccacgcccaccccgaactgggcaataccgaaacccgcaccgccgagttggtcgccaaacagttgcgcgaactcggccttgaggtgaagaccggggtggcccgcaccggcgtcgtcgccatcttgaaaggtgcgctgcccggcccgaccgtggccctgcgcgccgacatggatgcgctgccggtcaaggaagtcgccgacctgcccttcgcctccaaagccaagggcacctacctgggcaaggaagtcgacgtgatgcacgcctgcggccacgacgcacataccgctatcctgctgagcactgcgaagattcttacggggatgcgcgagcgcctgcccggcaccgtggtgttttatttccaaccggccgaagaaggccccagcgactttatccccgacggcaagaacacctggggcgcgaagatgatggtgcaggaaggcgtaatgaaagcgcccaagccggatgcggtgtttggcctgcacgtatgggccggtgtgcctgccgggcaaatcgcctatcgcccgggcccgactttggccagctccgatgacctgcgcatcaaaatcctcggcaaacagacccacgccggccgcccctgggacggtatcgacccgatcaccgtcggcgcgcaaaccattgtcggcctgcagaccgtggtcagccgccgtaccgatatttcgtcattcccctctgtggtgagcatcggcaccatcaacggtggcactcgctacaacatcatccccgagtcggtggacatgagcggcacccttcgctcctacgactatggcattcgtcagaagctgcatgcagacgtgcgtcaaaccgtagagaaaatcgccgaaagcggtggcgccaaggccgaagtgacaatcatcgagaagtacgaccccaccatcaacaacccggcgctgaccgagaaaatgctgccgagcctgcgttgggcggctcaggatgatgtggtgcaaggcccattggtaggtggcgccgaagacttctcgttctatgccaaggaagcgccgggtctgtttgtgttcctgggggtgaccccaagggaccaggacatgagcaaggcggcgccgaatcacaacccagggttctttgtggatgagtcggcattggtggtgggcgtgaggacactggcgtcgttggcgacggattacctttacacccacacccccctgtaggagcgagcttgctcgcgaaaaacttcagaacgccgcgtttattcagggtaaacgcggcgttcttgcgttcttcgcgagcaagctcgctcctacagtgtattggggtgaatcagttggcgagggccgcgccatccattttctggcgcaggctcagcgggcgcatgtcagtccagacttcctcgatgtaggccaggcattctttcttcatgccgctcttgcccacggtgcgccagccttctggcacggccttgtagtcgggccagatcgaatactgttcttcatggttgaccactacctgaaagaggatgtcgtcgcggtcaaatactgaggtcattgctgttctccgtcgctcaaaggctggctgcgcaccacgcgcagcactgatatctgtagaaacgtaccaagggcctggaaaattagacgctggccacggccgccgccaaggcgcgcccgaaaatctcggccacctggtcgacttcgccagcggtgatcaccagcggtggcaggaaacgcaccacactgccatggcgcccgcccagttccaggatcagcccgcgcttgaggcattcgcgctgcaccagcggtgccaactggcgatgcaccggtgggtggccctgactgtcaggcgtgccagtcgggtctaccagctccacccccagcatcagcccacgcccgcggatatcccccaggtgcgggaagtcgcgctgcaggatgcgcaggtgttcgcccaggcgctcgcccatggccgccgcatggcctgccaggtcgtgatccttgaggtagcgcatcaccgccgagcccgccgccatcgccatttgattgccgcgaaaggtcccggcatgggcacccggcagccaggtgtcgagccactcgcgatacaccaccaccgccagcggcaggctgccgccaatggctttggacatgaccaccacgtccgggatgatgccggcgtgttcgaaggcaaacattttgccggtacgcccaaaaccactctggatttcatcgacgatcaacgccacccccgcttgcgcggtgatacggcgcagaccacgcagccagtcgaggtccgccgggatcacaccgccctcaccctggaccacttcgacaattaccgccgctggcagcaacacgccggcttccggatcgttgagcaggttttccaggtaatgcaggttgacccgcacaccctcagcgccacccaggccgaacgggcaacggtagtcatacgggaagggcaggaattgcacgccattgccgagcaatgcgcccaagggtttcttcggccccaggctgcccatcagactcagcgcgccctggctcatgccgtgatagccgccctggaacgacagcacagtgctgcgcccggtggcggtgcgcaccagcttcaacgcggcttccaccgcatcggtaccggtggggccgcagaactggattttggcttcccgcgccagttccgagggcagcaaaccgaacaggtcctgcacgaattgatccttgaccggcgtagtcaggtccagggtgtgcaggggcagttcgtcgctcaacacttgctggatggcctggatcaccaccgggtggttatgccccagcgccagagtgccggcaccggccaggcaatcgatgaaccggcgcccctccacgtcttccacataaatgcccttggcgcgcttgagcgccaggggaatgcgccgtgggtagctgcgggcgttggattcctgctggcgctgacgggccagcagcgggctttcgtcaaactgatagagcgtttccgcggcctgcaccggggcgtcttcgatacggctggtagcgactgacatctctggatccctcaatacgctgatgatggtgaccaaactgccgatccgttggcgtctggcccaagggcatgcgcacggatttcctgttgtggagacgcttcaggtgcacggggatttaggaggttggtcggatatttaccgactatgcagttcgccgcagccaccgctaaccacgatgcgaagcgagccgctcttgatctgcttttgatctcaggcgccccgttaaaccacgctggccgtaatccgccagtgatttggggcgaggaccttttggttacttttggctgggccggcattccggtccttccaaaagtgacccgctgtcagagcggaaccctaagtggccgttaccgcagcaatggatatgtactcggtataacagtgtcggctggcaggccgtcatcgcaggcaagccagctcccacagttggatcgcggcgcgtcaggtagataagcgtcggctgtcaggccgtcttcgcaggcaagcccctcccacatgggggacccacatttgaacagtgctcggcatcaaatcccacggtacttttcgttcagtgcatacaagatcgcgcaagtctctgcatccaggaacccacaataatccagtggccgaaagtgcatctggaacgctcgggtacgctgctcaaaggcctggcgattctgcgcgggcttatagccataccgctgaaacgcccgctccacttccacttccggcggcaagccgagacaaaagcggcgctggtacatcgcccgggtcgattgatcaaaccaggccccgatgccggcctcatgcagcacacgccagggcagccgaggccccgggtcgctcttgcgccagtaggccacatccgaatgcccgagccagtcagtggggccgacctgcggatagcgctccagcaagtcgcgaagcaattcaatcagtacgtcaatctgtgccaacgtgtattcaggaaaggtaaagacgccggcgtcatcccgcgccaggttgacgatttcaatgcccatcgagcggctgttgaggtcagccttccccgcccaatagctcacgccggcatgccaggcgcgctggccctcgtccaccaggcgaaacacccgcagttcttcataaccggcggcgcggtagctgggttcatcagggtcgggcagcagatagtgagcgctgacgccatcttgagtgagggtgcgtagcgaggaagcaaagggcgaagcggtgtagtgcaaaaccacctgttgcacggtttcgccgcggcggtcgttgaaatccctggcggggaaactggtgtcgatcaccaacataagaacggtccttttcaattcaggccgactcattcggcccgttcaagcgcaaaaaaattaccgccatcctgaaggcttgagcctcaggcgggcggtaattatttgccacgtgaaaagtcagttcagcgccgcaacggcatgcccaggtcgacccgcataccgtcgggctggctgtcaaaatgcaacgagcaggagcaacgttgcacaatcgcctggacaatcgccaggcccaggccacagccttcgctgctgccattgcgccagaagcgttgggtgaggtattgcaggtcttcgctggagatctgctggccatggtcacgcacgcggaacaccacgttatccggggtagaaaatacctgcagttccacgcgagtctcggcgggggtatggcgcaaggcgttgtccagcaggttacgcaaggccgcgacggccaggcccacgggcatttctaccggagcgtgggagagatccggcgccaggatcagatcgatacgggaattgtcaccggcgttggcatcctggatccccaaccgggcgacttcctcggcactcgattgcaagccatcatcaaacgacaggctgccttccacccgcgccagcaacaacagttgctccagggtgcgatgcaagcggtcggcgccctcctcggcgtgcgccagggactggtcgcgggccgcgccctcggtcatgcgcgcgacttgcaggtgggtcttgatcgcggtcaacgggctgcgcagttcatgggcggcgtcaccggtcaggcgacgttcgcgctcgatggtcttggcaatgcgctgcagcagttggttctgggtgtcgagcaacggcttgagttcactgggcagcgggtgaatctgcaagggttcgagggagtcgacactgcgccgcatcagcgcgtcacgcatacggttgagcggcaccaggctctggccgatgcccagccacagcaggcacaggcagcccagcaacgccacgccgaccggcaccgacgccgccagcaggatcgacaggttgagggcttcgcgctccacctggcggtcggcggtggtgatcagcaaatcgccacgggacagggtaaaactgcgccagcccacaccgtcgatgatctggtcgcgaaaaccgctgcggcgcgactccagcccttcctccggcgtggtatggctacgcgccaggatctcgccgcgcaaggaactgacctggcaggccatgccgcccggcacattcagttgttcggtgcgcaaatgcgcgccaccgctgacgctggccaggcccggcatctgctcggtgagcccggccaccatgcgcgccgaagccaccaggcgctggtcgagggaaaacatcatctggttgcgcaaatcgttgagcatccaggcggccgccagcacccagatcagcacaaaagcggcgcccagcttgaacgtcaggcgcagacgcaagctcatcacggcgtgttttctcccccatcagccgtgcccaggcgatagcccagccccctgacggtttcgacgatgccgttgcccaacttgcgtcgcaagtggtggatgtgcacgttgagcgcgttgctttccagttcgtcactgaagccgtagacgctgtccttgagctgttcgctggacagaacgcgccccttgttgtgcagcaacgcctgcaacaacgcctgttcgcgccgggacaggtccactggctggccgccgaggaaggtctcgcggctgctggggtcgtaggccaggcggccatgttcgatcaggttgacgctacggcctgccacccggcgcagcagggtttgcaggcgcgcggcgagttcacgcaggtcgaagggcttgagcaggtagtcgtcggcgccggcttgcaggccgtcgacgcgattggtcaccgaatcccgcgcggtgaggatcagcaccggaatctccaacccctggctgcgctgttgttgcagcagcttgaggccgtcttcgtcgggcaggccaaggtcgagcaccatgatgtcgaaggccgcagccttgagcatcgcccgcgcagccgaggccgtggccacgcgctccacggtaaagccttgggcggtcaggccggccacgatgccactggcgatcagttcgtcgtcttcacagaccagtacgtgcatggttaacccttcatgaaagatggcgcgattagaaaagccacggattaagcgcgcattatgccgctaaagttcgcaacaccggacaatccctacactctagaatagcggtggttaatcatcggttaatcaacgccacacattgtgtgcctcacttgcatcgaactaaggcttgaccatgcggcatctgtttacctttctgctggtgttgttcgcgggattcgcccaggcagcgccgggcagccccttcgaaaccaaacccgacttcctcccggtgggcaaagccttcgcctttacctccgaacgtcttgaaagcggcgaaacccagctgttttggcagattgccgacggttactacctgtaccagcagcgcatgaagttcgacggcctggccgaaaagcccgtgctgcccgagggtgaagcccatagcgacgagttctttggcgagcagcaagtgtatcgccagggcctggaagtgaagatccccgccggcaccaccggccaggtcaagctcggctggcagggctgcgccgatgcgggcctgtgctatccaccgcagtcgatcaccgtggacctgggcggcaacccggccgtcgccgccaccgcgcaagcccaggatcaaagcctagccagcggcctgcagcagcgcagcctggggtggagcctgctggtgttcttcggcctgggcctgctgttggcgtttgcgccttgctcgttgccgatgctgccgatcctcgccggcctggtggtgggcagtggcgccagcccgcgccgtggctttgccctggccggcagctacgtggtgtgcatggcgctggtatatgccgccttgggggtgatggccgcgttgctcggcgccaaccttgccgcacttttgcaaacgccgtggatcctcggcagctttgcggcgttgttcgtgctgctcgccctgccgatgttcggcttctttgaactgcaactgcccgccttcctgcgcgaccgcctcgataacgtcagccgccagcaaagcggtggcagcctggtgggtgccggtgtgctcggcgcgttgtccggcctgctggtggggccgtgcatgaccgcgcctctggctggcgccctgctgtacatcgcccagagcggcaatgcgctgcacggtggcctgatcctgtttgccatgggcatcggtatcggcattcccctgttgttgctggtgaccgtgggcaatcgcttcctgcccaagccgggcacctggatgaacgtgctcaagggcatcttcggcttcctgttcctgggcactgcggtgctgatgattcgcccggtggtcggtgacagcctgtggatcggcctgtggggcgccttggcgctggtgatggcgtactgtggctgggcgctggcccgtgagtccggcctggcggccaaggtatttggcgccggttccctggtgctgggcctgtggggcgcggtgctggtggtgggtgcggccggtggcagcgatgagctgtggcaaccgttgaaggtctacagcggctcgcggctcgccgatgcacccagcgctcacgatgccttcaccacggtcagcgatccggcagtattgcaaagccaactcgacagcgccaaggcccagggccagtgggtgctgttggactactacgccgactggtgcgtgtcgtgcaagatcatggaaaaacaggtgttcggcaaacccgaggtgatggacgcgctcaaagacgtgcgcctgttacgcctggacgtcaccgccgacaacgccgccagccgcgagctgctgggccgctacaaagtgccggggccaccgagcttcgtgtggatcggcccggacggtgaagaacgccgcgcccaacgcatcaccggcgaagtagacgccgccgccttcctgcaacgctggacacaaacccgagacgcgcgctgatgctgaccctgaccatcggcaccttcgccatcgccctgaatcacatcctgctgatcagcgcactgattctcgccaccctggtgggctggcgcgtggccaagcgcggcggcgagaacccggagtcggtgctgttcagcctgttcctgctgggcctgctcgccgcccgggtcagctttgtgctgatgtactggagttattacagcaacgactgggtggagatggtcgacctgcgtgacggcggctttctcgcctggcccgggatcatcgcgctgatcctcggcgcgctggcgtacggctggcgtcgcccggccctgcgcaagccgctcagcgccggggtgatcaccggcctgttgttctggggcatgaccagcctgtccctgagcctgtatgaaaaaggcacgcgcctgccggacatcaccctgcgcaacgccaacggcgaagtggtgcaactggcggactaccagggcggcccgctggtgatcaacctgtgggccacctggtgcccaccgtgcaggcgcgaaatgcccgtgctggaaaacgcccagcgcatgcgccccgacgtgaccttcctgttcgtcaaccaggccgaaagcatgcaaagcgtcagcacctacctggccacccagggcctgaacctggacaacgtgctgttcgacgccagcggccgcctcggccaggccgtgggctccatggccctgccgactacgctgttctaccaagccgatgggcgcctgatcaacagccacctgggcgaactctccgaagccagcctggcccgtgccatggaacccttcgacaacaccacgacaaggaaaccgacatgcctcgcctccgccacctgctgaccctgctgcctttgacgctagccgctgcgctggcccaggccgaagacctgccggccccgatcaaacagatcgaagccaagggcgccaagatcatcggcaaattcgacgcccccagcggcctcaccggctacgcagcccagtaccagaaccgtggcatggccctgtacttgaccgccgacggcaaaaacgtcatcgccggcaacctgtacgacgcccagggcaatgacctgagcaccgcgcccctggaaaaactggtgtacgcgccgatggccaaggaagtctgggccaagatggaaaacagcagctggatccaggacggcgataaaaacgcgccgcgcaccgtctacctgttcagcgaccccaactgcccgtattgcaacatgttctgggaacaggcccgcccatgggtcaaggccggcaaggtgcagttgcgccacatcatggtcggcatcatccgcgaagacagcccaggcaaatccgccgccctgctcgccgccaaagacccgcaaaaagccctgcaagaacacgaagccgccggcaagggcagcaagctcaaggcgctggaaaagatcccggccgaggtcgaggccaagcttgatgcgaatatgaagttgatggatgaactggagttgtcggcgacgccggcgattttctatctggatgacaagggtgggttgcagcagcagcaaggggctccgtcgccggagaagttaattaagatactgggccccaaataaactttaaaaaagcgcctatcccagataggcgcctttttcagcaacagcgaatttagcggctgctaaccatgcactcggatatccgtaaacgcataatcattgccgtatcccgccccctcatgattcaaaatctccaaccgcattgactctgcgctggcgacgaacgagcccttgagtggggcccacgccgtactggagaacgtagtgacgtttgtaacagctcccgcattcgtccgcagtgataatttggggagtgccggtgtggcattgagcgagcacgcgatcatgctgaaattgtatctacgattaacctcaagtccagtaaagtctttatatagaagcactcccaaaacagctggacgatgtgtccaattgactaagcaagattttcccgcatgtgacccgtaaaccagttcaccattggctgcactaccgagcctccagctgttccaattgccacctataaacggagtaaagtcattcaatacagctttgacggtcagcacccgcaatgggcacaccacgttttccttcaagttgccctgcgtggacacgctgaaagcaagggtcaaggtgctgttgttttttagtctgtccagcaaggcatgctggataggacccgccaccccgttagtcgcctctccatcggtgacgattctgttcgcatagacatcgaacgtgtaagaaaaaccatttctatctgttcctgtcgcccgcagccagcacttctgcccttttcgtaagaaccacattggatcttcgaaggagttggcattgccggtaattgcccgcatgtccaaaatgccgtgatcaaccccaggtggtgtcgcttccaacacgtttggcgtttccagacgcgtgggcagattgatcttcaaactcaacggcgctgaagtctgtgcttccctacatttggtgatcacggtgtaagttatttccaccgtttcacccatgctctcgatcactgcttcagcaggcaggcgaaacttgacatcgccttcacgactgccgcgctgaggctccagtgtccagtagagtccgttgggtctctgccaacatagagcgatctcatgttgttcattcatacgcaggtaactgacagtcacttccaggccatcccgagcgttccacggctccaattcattgtcttgcgccttgtcgacggtgggtgggagcagcaccaggtcttcctggatgatatggaatttcgcagccggagcttcaatagcgtctgatcgatcacaggcttcgcagaagctaaaggcaaaatgcagttcaaagtcactgcaatcgtccattttttgcagcttatctctggggataaatgtttcaacgcctttattcatccagtcctcggtaacaggctccttgatcagaatatcagaccgatagtcacttccgtgctcatgcgtacctgtgatccacgcccagcaataattggcgcaggtggcataatcccctatctgaacaaacgccgttgcgtcctcagagaaaatattgagattgaccttaccgtgggtcgcctctgcaatctccgactgtgaaagtttaggtttaagtacattgaccactcgctccggagactgtggttcaggccccatcaagttaggaaatcgaacggtatagctcagcgccatcggcttgttaaagaaacaggcaatcacacagcgtggcaacttgaccgatgcctgctctccatcgttttgaatttctacgcagccaagtgacgtcgatccgtagccggggccgctcacgtagaagcagatctgatcacctgcgtacgtgtccagctccggcgcgtccacattgcccccgtttttggtgagttgcgggttaaggcaccacttatcgtcgaaaaacgcagattgccgcaaatggggcggcggcaaattctccaggccttgatccccaatgaaagcagcggtacgacgatgttggatttgaagagcgttcctgggaagccgggtctcttcatcaggattttcaacttcagccggcggttggggctcctcgccactggtgatccaggcagcctgacaagtaattgactcgtaacgtggcttttgacgtgccagccaaccacgaggaatcggaaattcaagtttttcgcctgatgctatatcttcaagcgttaatgcatacccataagccacgatatagaaaacgggttttccactgaattgctcaataacgacactgcagtaaattttatctccaacttgggcaagtggaggaataggtatttcaactctctcatcgcctttgtgatcgtgcatgtcataggtgggcgtattttggaatatcttttcatctcttaatcgaggcgcaagcgctttactttgttctgcagagtaaaaagtcacccccacttccttggtcagtgaaacggctggtttaccgctcactgtgccctcgtaccatacgatcagtgtgtaccccatggacatggtcaagtatttctgcggaatcaggatttccctggcacccggctgcccgcttgagtcaacaacatcattcaagcggatctctggcgcctcctttatgctgaactttacggtgatgtccaacctgtccatgcgcgagtcgacagtcaggtatgagtccttctccatcgcttctgctgtaatcgtcccgtacagctcactggagatgattggcgcgtcgacttccaacgcctgcggctgtggcgtaattgaagacgttagcgcattgtcggtacttgagggggtttcaggagtggaggtttgcttggccattttcagaactccgtgttcaaaagaggtaggtatcctcgacccgcccaacccggccaaggaactcccttaagtgagtcctatttttcctctcccgcctactgtcagaattgacagttctggctaaaaaaaaggcgctacccgaccaacgggtagcgcccactcaagccttaaagcccctccaactccgccatcaaatcactcaaccgatccaccttctcggcactgatctcattgcccgccaacccgtcgatatacgcggccaactccgccacggtgctgcactcgaacatcgcccgcaatggcacgtcgcgctgcaacgttttttgcacccgcgaagcgatctgcgtagccagcagcgagtgcccgcccagttcgaagaagttgtcctgcaccccaacccgctcgactttcagcacctcggcccagatagccgccaacgtggtttccagttcagtgcgcggcgccacatagtcctgattgtgcaactggccgatctccagcgccggcagggccttgcggtcgagtttgccgttggcattcaggggcaggcggtcaagccatagccactgcagcggcaccatgtattcgggcagttcggcacgcaggcgttgcttgatacgctccagctgttcgctcgggtcgagcgtggcatcggcggccaccaggtagccgaccaggtgcttgccattggccccctcttgcacacccaccgccgcgtcacgcacgtgcggttgttcgtgcaggcgcgcttcgatttcacccaactcgatgcggtagccgcgaatcttcacctggtggtcgatacgcccgacatactccagcaccccatcgctgcgacgccgtgccaggtcgccggtacggtagagccgctcgccaggcgcgccaaaggggttgggtacaaacacctgggcggtgcgcagcggatcgctgacatagccgcgaccgacgccggtgccggcgacgcacaactcaccgaccgcgccttggggcaccaactccaaggcgccatcgagcaggtacaagcggttgttgtcggtcggcgtaccaatcggcaggtaagtaccacgggtggagaccagatcgacgcgaaagaacgccacatcatcggagcattccgccgggccgtaggcattcaccaagccgatctgcgggtaacgcagcagccactgatgggccaactccggcggcatggcctccccggtcggcaacatccagcgcaggccgtcgaggctgatacgctcctgggccagcatgccctgaatcagcgacggcacactctccagcacggtgatgccctgtgcttgaacgtgggccaaaagcccttgcggatcatgggcgatggtagcgggcacaatgtccacccgtgcgccaaacagcggcgcggcgaggaactgccacacagaaatatcgaagctttgcgacgcggtctgggcgatcacatcggcatcgctcaagttcaggtacggcaccttgctcaactggttgttgagcatgccacgctgttcgaccatcacgcccttgggcaagccagtggaacccgaggtatagatcacgtaggcaaggttgtccgggccgctgtagacacctgggttttcgccacgggcggggatttcctcccacaccagcaactggcagtcgaagccttcaagcagttcgatggcctgttcccggcacgcttcggtgcacaccagcaacggtgtgcggctcaggtcgatgatgcggctcaggcgcgggccaggcagccctgggtccagcggcaggtaaccggcaccggccttgaagctgccgatgatcatgccgagcaagtccaacccacgttcagccagcaacgccaccggttggtccaggcccacaccggccgcaagcaacgcgtggcccaggccgttactgcggcggttcagctcgtcgtagctccattgctggtcgaggcaactggcggcgatacgttgcggatgctgtgcgacctgcgcctcgaacaactcgatatagctgcgttccagcgggtaggcatgtgcgctctggttacagccttccacgagaaactcacgctcctgctcgcccatcagcgccagctcggccatgtcgccatggaagccctgcaccagcgccagcaacaggcgtttgaactcagcgagcatgccttgcacggtgctttcgtcgaaataacgctggtcgtaggacaggtgcaaaccgaggtcatcccccggatagcacacggcagtcagcgggaagttggtgtgggtacgcccggaatccgaggtggcgttcaggctttgcgcacggtccagcaccgagacttccaccggtgcgttctcgaacacaaacaggctgtcgaacagcggctggcccttgggcaattcgctgtgttcctggatcgtcaccagcggcaggtactcgtactcgcgcaactgcatattactgtcgagcaaagcgctcaaccactggcgcacgctgcaaggctgatcatcctcgggcagtttcacccgcagcgcgatactgttgataaacagcccgacggtgcgttgcatctcgggcatttccaccgggcgcccggccacggtgacaccgaacagcacgtcgcgatcgccactcaaacgccgcagcaccagggcccacgccgcctgggcgaaagtgttgacggtaagctgatgcgcctgggccagttcgcgcagttgcgcaccgtcgcgggcatccaggcgggtgtagcagtcgcccaccaccatgccgccactgccaccggcgtgttcgcgcaggaacgggcggtcactcgggatcggcgtggcgcgctcgaagccttgcaagttttgctgccaccactggcgcgcctcgttgaggtcctggcgttgcagccaggcaatgtagtcgcgatagcgcggcggcgttgccagttgcgcatcgcggccttcgcccagggccgtgtagatatcgaagaagtcattcatcagcagcgaacggcaccaggcatcgatcaggatgtggtggttgctcatcatgaaccagtagcgcgcctcgcccacgcgaatcaggcgcaagtggaaaggcgcctggttgagtaagtcaaaaccggcttcgcgctcggccttgagcaaggcttgcagacgcggctcctgctcatcctgcgggtcggcgctccagtccaggtactcaatcggcgtgctgccgggcttgtggatcacttgcagcatgtcttcgccgacgttccagcagaacgaggcacgcaaggcttcgtggcgggcgatcaccgcttgccaggcctgggcaaaacgctccggatccagggcgctgttgatgcggtagcggtcctgcatgtaatacaggccggtgcccggctccagcagggtgtgcagcagcaggccctcttgcatcggggtcagcgggtagacgtcttcgatggcgctggcgggtaccggcaaggcgtccagttgcacctgggtcaggtgtgccagggggaagtcggacggcgtgaggccgccggcatcatcctgcaggcaatgggcgataaggctgtgcaattcggccaggtaagcctcggccagatcgcgaatcacctgttgatcatgacgctcacggctgaacgtccaacgcagcaccagctcgccgccgtagacctggctgtcgatgctcagttcattgggcaacggcgcatccgggtcatgggccagaccggcggattcctccagcggatggaacaacgcgtcagcgccgaaactctggtcgaactggcccaggtagttgaaggtgatctgcgcgctcggcaaggcggccatgctctgtttgcacaggtcatcggccaggtaacgcagcacgccataacccaagcctttatggggcacaccacgcagttgctccttgatcgccttgatcgagtcgccctgctcggcctgcggcgtcaggcgcaacggataggcactggtgaaccagcccacgctgcgggtcaggtcgatgtcatcgaacaaggtttcgcggccatggccttccagctggatcagtgccgaggcctgcccgctccagcggcacagtacgcgggccagggcggtcagcaacaggtcgttgacctgggtgcgataggcactcggcgcctgttgcagcaactgccgggtgcgctcggcatccaggcgcacgctaaccgtttcagcatcgctattgcgccgtgcgccttggggacgctgcaccggcaaggccacggccgggccagccaattgcgcttgccacaggctcaactcttcgcgcaaggactcactgtgggcataggcttgcaagcgcgcagcccaatcgcgcagcgcgctggtcttggccggcaggctgacggactggccttcactgagttggcgataaacgttttgcaggtcttccagcaggacgcgccacgacacgccgtccaccaccaggtgatggatggcgatcagcaagcgctgctggccttgcggcccgtccaccagcaaggcgcgcaacagcggcccctgtgccaggtcgaggctgcgctgggtgtcggtgaacaacgccgtgcacgcctgcatgtcgcgcacctgcgcctgcagcagcacgccaccttccggcacgcccaagtgctcggcatgccattgcgcgccacgcggggtaaagctcaagcgcagcgcgtcgtggtgttccagcacggccagcagcgcttgctccaggcgatgggcatcgagcagttgcagtggcttgagcaccaacgcctggttccagtgctggcgagccgggatgtcggtgtcgaagaaccagtgctggatcggcgtgaggcccgaaggaccggtcagcagcccttgctcggcgatgacgcgctccgagcgggtcgccacggccgccaggctttgtacagtctggtgctggaacaggtcacggggactgaaatgaatcccggcctggcgcgcacggctcaccacctggattgacaggatcgagtcgccgcccagttcaaagaaattatcgtcgaggccgacttgctccacgttcagcaccgcgcaccagatggcggccaggctgtgttccagctcactgcgaggggccacgtaggcttggcgattggcctctgggtccggctccggcaaggcgcggcggtcgagcttgccgttggcggtgagtggcatgctttgaagtacgatcagatgcgcgggcaccatgtagtccggcagttgcgccttgaggtgcgccttcaacgcgtcgcgcaaggcggcgtgctcggcatcgctgaccaggtacgccaccagctgtttgccgctcggcgcatccagggccagcaccactgcttcgcgcacagcttcatgttcgagcaagcgtgtttcgatttcgcccagttcgatgcggaaaccgcgaatcttcacctgatggtcgatgcgccccaggtactccaccaggccatcggcgcgttggcgcaccaggtcgccggtacgatataaacgcccgccctcgatggcaaacggatccgcgacaaagcgctccgccgtcatccccggacgctggtgataaccctgagccaggccggcgccaccgatgtacagctcaccgctggcgccttggggcaccagcgccaagtcggcgtcgagaatgtaggccacgcgctcgccgacgatgctgccgatcggcacactgccggccccctcctccaactgctcgggcgccaggctggccaggggcatcaccacggtttcggtggggccgtaggcgttgaagactagctggggcatgaatgccgcacggatgcggtgcaagtgttcgccggtcaaggcttcgccaccggtgatgcacatgcgcaccggcagcgtctgttgctgggtcgccagccactgcgccagctggctgccgtagctaggggtaaaaccgagcacattgatgcgatgggtacggatcagcgcgcagatttcttcggcatcccactggccctgggcgcgcaataccacccgcgccccgcacagcagcggcaccagcaaacgctcggtggcagcgtcaaagttgatcgaataaaagtgcagctcgcagtcatccgggcgcatgtcaaagcgctcgatcaccgcttggcagtgcatggcgatctcaccgtgggacaccaccacgcccttgggcttgcccgtagagcccgaggtgtagatgaggtatgcctggtgttgcgccagactcacgaacggcagcgcctcggcggggtaattggccagcaccggcgagtcatcctccaggcaccagcacgccaccgtcgccggcaattcacccagggcttcgagcagggccgcatcactgagcagcaggccgatgccactgtcttcgatcatgtaatgcaagcggtccagcgggtattccgggtccagcggcacgtaggcgccgccggccttgaggatcgccagcaaaccgatgaccatttccagcgaacgcggcagcgccaggcccacgcgcacctgcgggcccaccccacgctcgcgtagcatccaggccaggcggttggcgcgctcatccagttgtgcatacgtgagggtcacaccggcaaaggtcagcgccggggcatccggccgctggctggcctgctggctgaacagctgatggatgcactggtcgaggcgatgcgcgcccttctccacccccaggctgtcttgcaaggcgcgttgctcatccgcgctcagcaacggcaattcgctgaggcgctggccgggatcggcgatcaacgcttcgagcaggttgcaccaatgcgcggccatgcgtgcaatgcgcggctcgtcgaacaggtcggtgctgtaggtcaggcagcaacccaggcgatggtcgaggtcggtgacttccaggttgaggtcgaacttggtcgcccgcgcatcgttggccaggtactccacggtcatgccggccagttggcggctttgctggaattcccagcgctgcacgttgcacatcacctggaacaacgggttgtacgccgcgctgcgcggtggttgcagagcttccaccaggtggtcgaacggcaggtcctgatgggactggccttcgatcacggtatggcgcacctgctcgaacaactcgctgacctgcatctgcccagtgagctggcaacgcagcacctgggtattgaggaacgcgccaatcaagccttcgctttccgggcggatacggttggccacgggcgcgccgatacgcaggtcggtctggccgctgtagcggtagagcaacaccgccagggtcgcggtcatggtcatgaacagcgtgaggccctgttgcgcgttgaaggcacgcacacgggcggccagctcatcgctcaaatcaaagcggtacagctcgccccggtggctttgcaccggtgggcgtggacggtcgccgggcagttccagcaacgggtgttcgttgcccagttgcgcggtccagtagtccagctggcgctggcgctcaccggcttccatccaccggcgttgccacacgctgtagtcgaggtactgcaccggcaacgcgggcagcggcgagtcgcgctcgtcgataaaggcttcatacagggcgctgagttcacgggcaaagatgtccatggcccagccttcggtgacgatatggtgcagggtcagcaccaggtaatgctcttgctcgccagccttgaccacgcaggcgcgcaacagcggcccggtttccaggttgaacggcgtgtgcgcctcgacatcggccagttgctgcaaacgctgctggcgctgcagctcatccaatgcgcagaagtcctgccagcccatgcgcacagtggtctgcgccgagaccttctgacaggccacaccgtcaacgcttgggaaagtggtgcgcagggtttcatgacgcatgatcaaggcttgcaaggctgcctcgaaacgccccacatccagtaccccgcgcaggcgcgccatgccgccgacgttataggccgggctgtccggttccatctgccagaggaaccacatgcgctgctgggaataggacaaggggaccggctggctgcggtcgactttggcgatggcagtctgttgattgcgctggcccgccgcctggatacgcccgacctgctcggcaaaatcgcccagctcgctggcttcgaacagggtgcgcagcggcagctcgacgtcacaaacctggcgggtgcgagagatgatttgcgtggccagcaacgagtgcccgcccagtgcgaaaaagtcatcgcgcaggccgatacgtggcaggcccagcacctcgcgccagatcgcggcgatttgcagctgcaagactgtgtgcggttcgacgtgttcgcgggtttgccataccggctccggcaaggcgcgccggtcgagcttgccactggggctcaggggcatggcatccaggcgcatcagcagcgcgggcaccatgtactccggcaactcggcggccagggcgattttgaccgtttgctcatccagttcggtgtcagcggtgtagtagccgatcaactgggcatcacgcaccagcaccacggcttgggcgatgcctgcgagggccagcaggcgcgcttcgatttcttccggctccactcggaaaccgcgcagcttgacctgctgatcgaggcgcccgaggtattcgaggacgccatcggcgttccagcgcgcacggtcaccggtgcgatacagccgagtgcccgccgcgcccaacgggtcggcgacaaaacgttcggccgtcagcccggcacggcccaggtaaccccgcgccaggccgataccgccgatgcacagttcgcccggcacaccggccggcagcgggttgagctgctcgtccagtacgcggcaaatcacattgcccaatggccggccaatcggcgagcgctcgccatccgaggcagcgcactgccaatgggtgacgttgatcgcggtttcggtcgggccatagcggttgtgcaattgcaccgctggcaagcgcgccaatacgcggttacgcaactcggcgggcaaggcttcgccgccagagaacaggtgacgcaggctggtgcattcggccaccagtggctcgtcgataaacagctgcaacagcggcggcacgaagtgcagcgtggtcaccccatgttcctgcaccagctgcgcgatacggtgcgggtcgcgatgttcgccaggcccggccagcaccaggcggcagccggtaatcaatggccagaagcattcccacaccgacacgtcaaaactgatcggcgccttttgcatcagcacatcggtgtcgttcagttgataggtggcctgcatccactgcaaccgctcggccagggcgccgtgggtgttgcccacgcctttgggttggccggtggaaccggaagtgtagatcacgtaggcaaggttatcgccgtgcagatgcaagccgggcgcctgggtcggccagctgtcgaggtgcaggctgtccatggcgatcacgcacacgccttcggcgctgggcagttggggcagcaacgcggtctgggtgagcagcagttgcacgccgctgtccttgagcatgtaggccaggcgctcggcggggtaatccgggtccagcggcacgtaggcgccaccggccttgatgatggcgagcaggccgatcagcaattgcggcgaacgctcggcggcgatggctacgcacacgtccgggccgacgcctttgtcgcgcaggtaatgggccaggcggttggcctgggtgtgcagttgggcgaaggtcaggctgccgtcctgccagaccagtgcggtggcgtccgacgtctgttggctgagcagctcgggcagccagtgccgggccggcgcgcagggggcttcgctccagggttgctgttcgtcggcctgcatcaatggcaggtcgccgatggcgtgttgtggttgcgcgcacacagcgtgaagtagatggatgaactgctcggccagacgctggatggtcgcgcaatcgaacagctcgtcggcgtagtcgaacgacaggctcaagcgcccattgcggtcttcttcgctgtgcagttgcaggtcgaacttggcttcgcggctgtgccagggcaactcatcggccagcaggcccggcaggcggcgcaaggcactgaggtcacgttgctggtggttgaacatgacctggaacaggccctgttcgcgggcctgggggaaggcttccagcagttgttcgaagggcaggtcctgatgggcctgggcggccaatgtggtctcgcgggtggcggccaacaactgattgaacggcaggcgcccgtccagctcggcgcgcagcaccagggtgttgataaagaagccgatcaggccctgggtttcatggcgtgcgcggttggcattgggcacgccgatacggatatcgcgctggccgctgtagcgatagagcaaggtctggaacgtcgccagcagcagcatgaacggcgtcgagtcatgggcctgggcggtctggcggatcgccgcactgaggcgcgcatccaggcgctggctatggcgcgcggcgctgtgccgatgctgggcggcacgcggatgatcggtggccaggttcagggccggatgctcgtcacccaactgcgctttccagtacgtcagctgtcgctggccctcgccttcggccagccattggcgctgccagctgccgtagtcggcgtattgcaagggcaaaggcggcagctccagggactggccttggacggcagcggcgtacaggcgcgagaactcgtcgatcaggatattcagcgaccaaccgtcggcaatgatgtggtgcaaagtcaccagcagttggtgctcttcatcgtccaggcgtaccagggtaacccgcagcaaggggcctttttccaggtcgaacggactgcgtgcctggtcttcgcggacccgttgcgcacgggcttcgcgttcggtgttgggcaggtcgctgaggtcgatgatcggcagttcgaaatccgccgttgcctcgacacgctgaaacgcctggccgtcgcgctcgtagaagcgcgtgcgcagggcttcgtgacgctggatcagttgctggaagctgtgacgcagcgcgtcttcatccagctcgccgcgcaggtgcaaggcgccgggaatggtgtaggcgctgctgtgagggtccaattgccaggtgatccacaggcggttctgtgccagggattggggcaggtcttcttgacgtgacagcgcgtgtattgcgccttgggccacgccgccgtcctgttgcaggtgcgccacagccgcagcaaaggccgcgagtgtcggcgcttcgaacagcaggcgtaggttcagctccagcccgaggctttcgcgcaggcgcgcgaccacttgggtcgcggtgatggagttgccgcccagcaagaaaaagtgatcgtcgcccgccacatgagccagttgcagttgctcgcaccagatcgccgcaatctgctgttgcaggtccgattccagcgccacttcgctcgccggcccctgctgcccggggaactgcgcgtagctgtcgaggctgccatcggcatgccgaagcgcacaggccgcacgctgcactttgccgctggaggtcttcggcaaggcgccggggttgagcagcaccaccacgctcggggcttgctggcaggcctcggccacggcttggcggatcgccttgatcagcgcttcgggcggcaggattttctgcacgctgcggctgatttccgcggcgatgccgatgccttccaggccctggtcattgaccgcaaacgcggcaacccggcccttgcgcaccacttccacttcgcgctcgatggtctgctcgatgtcctgggggtagaggttgtggccgcgcacgataagcaggtctttcaggcgcccggtgatgtacacctcaccgtcgcgaataaagcccaggtcgccagtgcgcaaccaggtgcggccagcatgctggacaaaggtcttggcgctggcttcagggttgcgccagtagccgtgggcgatgctcgggccggtggcccagagttcgccgacgcactggtcgggcagctcggtgagaatgtgcgggtcggcgatcaacacggcgtggtccggttggctggtgccgcaactcatgatcgcgctgccctgccccggttcggcgcggttggtggccagcgcctgctcgtccatgcgcatcgcgggaatgccacggccacggatgcctcccgcgacaaacagggtggcttcggccaggccgtaggaggcgaagaaattattcggggtgaaaccacaggccgcaaatttttccgcgaagcgttccagggtgtcgaggcggatcggttcggaacccgaataggccacgcgccagcggctcaaatccagacgctccagggccgactcgctgacccgttcgctgcacaggcggtaggcgaaatctgggccaccgctgatggtgccgccgtattcgctgatcgcctccagccagcgcaaaggtcggccaaggaagtaggccggcgacatcaatacgcagggcacgccgctgaaaatcggttgcagcaggccgccgatcaggcccatgtcgtggtacagcggcaaccaactgacgatcacgtcgtcggggttgaggtcgatgccaaaaccacggcggatcagcacttcgttggccaccaggttgccgtggctgacttgcacgcctttgggcaatgcggtggagccggaggtgtattgcaggaaggcgatgtcgtcggccttgaggtcgggctcgacccactggtcggccagctgcgcctccagggtgtcgacgctcaacaccgtgggcgcattttcaatctgcgccaggccctcgctgaggctggcaatggtcaacagcaggcgcggctcggcatcactgatgatcgacagcagacgctcctggtgatgacggcgcgtggattccggcggatacgccggcaccgcgatcaccccggcgtacaggcaaccaaagaacgccgccacatagtccggcccactggggaacagcaacaccgcacgctcgcccaggccagcgttggcttgcagggcggcggcgatggtgcgggcgcgttggtcgaggtcgcgataactgagcaccacactgtgctcggcgctctcggcgaggaagcgcaacgccacctggtccggcgtctgcgcagcacgctgttgaagggactggaccagggtgcgggggagttcgaaggcgtccatcatggggttcctgcctgaaatcggcttacgggaaattcgggaaatcggtggggttcagccggcggcgagctgccgcgccgcgccaatgcgccagcgcgccaggtgctcgtcggcatagcgacgcacacagcgcagcacggcgctttcttgctgcacgaggaagaagtgatggccgtcaaacatgtccagggaaaacccactggcggcgtcgagttgccagtcgagcaactggtcggcacgcacgctgtcctgcttgccaccgaacacgtggatcggcagcgccaggggctggcgctcgccataggtgaaactgccgcacagcaggaaatcggcgcgcaggatcggcaacatcagttgcatcaactcggggttggccagggcttcctcggcggtgccttgtaactcacgcaggcgggcgatgagttgggcatcggtcttttcgacggcgtactcgctcacatcacgacgcgccgggcccgccgtgccggacgcgaacaacgccagcggcgcaggcagattgcgtgcgtttaaagcgtgggccaattcaaacgccaacagcccgccaaggctgtggccgaacaaggcataagggccatcgagatcacggctgatctcttcagcaagctgcgcggccaaggccttgatatcgcgctgcaacggctcgtccatgcgcatgccgcgccccggcaattccagcgggcacacttgcagccagtccggcagaacccggcgccagcgcgcatagaccgaggcgctggcgcctgaatggggcaggcaaaacaggcgcagccgcaggggcgtactcatcgcgcgaggactccaaactgaaacacgctgaatgcacgataaaaacccatctggtcctcctgcgggtgctgatccttggccgttgtactaacgaacctgtcacccatgagaacggacggagccagcaaataattagtcgccgggggcgagcgagacgtggttcacacctttgcccaaggcataagattagttcgtcttctcatttgacaatcattatcattcagcataatttgttgcccgatgtgtaggaggcctcagcagggatgccctcccctaacctattagcaacaaggtgatttccatgacggaaccagtatccacaggcaggtgcgattcaccccttctccaggcattcgtcgacaatcggctgatcctggtgaagatcgcggcccgcatcaccgggtgccgctcccgcgccgaagacgtggtgcaagacgcctactttcggctgcagtcggcaccgaccatcacctcatcgttcaaggctcaactgagttatctgttccagatcgtgcgcaacctggcgatcgatcactatcgcaagcaggcgctggagctcaaatattccgggaccgaagaggaaggcttgaatgtggttattcacggcgcttcaccggaaacctcgcacatcaatttcaacaccctggaaaacatcgccgacgccctgacggagttgccacagcgcacccgctacgcgttcgagatgtaccgcttgcatggcgtgccgcaaaaagacatcgccaaggagcttggggtgtctccgaccttggtgaacttcatgattcgcgatgcgctggtgcattgccgcaaggtgtcgggcagtcatagcgatacgtttgcgcggcgggtttgagcgcagcgaggacattctgggtaagggcccacggtaaccacgatgcgaagcgagtcgctcttgatctgcttttgattttgatctcaggcgccccgttaaaccacgctggccgaacgcaggcttgaattcgtgggtaacccggcaggacgccgggttagccgccccgcgccatggatggcgcgtggcggcggcccacggattcaagcctgtgttcgggcacaccgagcctgggcgaggtgccgagtggtggggcaagagcgctttgcttactttcgcgcttttcgaaagtgagccgccgtcagggcggaaccctaagtggccgttaccgcaggaatggatatgtactaggtatatgtgtcgcctgtcaggccgccttcgcgagcaagcccgctcccacagttggatggtggggtgtcaggtagataggtgtcggctggcaggccatcatcgcaggcaagccagctcccacagttgaccccactgagcccaaaggatcttatttactgcgatctagggcagtggcgtcacatcaatacgatacggctcaaaaatcctcagcatctgcccactgctgcgtagccccttgagcaacgccgaaaacgcctcccccgtgatcggtgcctttggccgcagcaacgcgtagtggtgatacacctgatcaatacgctccgacaccaaaaactgccccgccatgtccgcgttgcgcaccatgaaatcactcaggtacgaacgggtaaccaacgcaatatccgcacgcccacgggcgaccatcagcaagttgctgtcgtgggaataggtcaacgtggcgttgtagtgctcggccatgttcttgggatcaggattgaagtcagcaaaggcatagtgatacccactgaacaccgccagacgtttaccggtaaggtcagaaaaataactctggtcgcgcccgggctgacgctgagcgacaaaaatctccgcatcttcgagccccatatcaacactggtatgggcaatattctgccaaccccaggacgggttttcgaagatcgccatgtcgacccggccttgctcgaagtcacgaaaacgccgggggatcgaggtaggcaccaccacaaactggtaatcggtttgcgcagcgttcaacgcctcgaccaattgcggcagcaacccggtgtcggcgccttgttcggggcgaacggtatagggcggaaagtgcgccgcgccgattctcaccaactgcgcggcaccggcctgcgtccacgcggcggtgcccagtgcccataaagtcagtcctgcagccagccgccatggcgaaaacatcgaggcacacaccgttgaagagttcaatgccgataagctaggcgtttttaccgggggagacaactttcgccagcaaattaatggcttgcgcctcagtctgacttcagcaccatcaacaaggcctcttcggccaactcttcaagggtcaggctgccttgggcgcgaaaccaggtggtggtccaggacaaggcgccggtgaggaagcgccgggtgataaacacatcgccccggatgtagccagcggccttggcctcgcccagtacctgcaaccagatctgctcatacacgtcacgcagggccagcacgtgcgcctggccttcggccgacagcgagcgccattcgtagaccagcaccgccatggcttcgccactgccgcccatgatcgactgcaactcgcagcggatcagcgccagcacgcgttcgcgcacggtgctcgcctcctccagtgaagcgcgcatcatcgcggtgttgtaatggatggtttcctccatcaccgcgcgcaggatctcatccttgctcttgaagtgatggaagatgctgccggactggatgcccacggcgccggccaggtcacgcacggtggtgcgctcgaaacccttgttgcgaaacagatgagccgcggtttgcagcaatttgccgcgggcgctctcggggtcggtcaattggccaccatcgaccatggtgcgcatcaccctcagggctttgtgctcatccatgttgctctccttcacctctactgtcatggccggcaatttaggccgtgaccgccacccaagcaagcgcttgggtaaaacttgtgactttagtttacacttgggtaaaacttgtgcctggagtttacaaaccaagcgcttgcttggtagtctcgacgccagcccttggaggaaggatttctcatgagcaagacggtacgtatcggctgcgccagcgccttctggggcgacacctgcaccgccgccgcccaattggtgcagggcggcgccctggattacctggtgttcgattacctggcggaagtcaccatgtcgatcctcgccggtgcccgcctgaaagaccccaaggccggttacgccacggactttgtcgaggtgctgacccccctgctggcggatatccagcgccaaggcatccgggtgatcagcaacgccggcggcattaacccccaggcctgcgccgctgccctgcaagcggcctgcgataacgcgcacatcccgctgaaaatcgccgtgttgctcggcgatgacttgcaccctcaactcaaacagctgccgcctgtcaccgacatgttcaacggcgccccactgccgcccctgtgcgtgtccgccaatgcctacctcggcgcaccgggcattgcccaggccctggggctcggcgccgatattgtcatcaccggccgcgtggtcgacagcgcagtggtcagcgcggcattggtgcatgaattcaactggtcgtggcaggactacgatcacctcgcccaggccgccctggccgggcatatcatcgaatgcggcgcccaatgcaccggtggtaacttcaccgactggcgtgacgtgccggactacgaacacatcggcttccccatcgtcgaagtcagcgccgacggccagttcaccgtcaacaaggtcgagggcagcggcggcctgatcagtgaactcagcgtggctgaacaactgctgtatgaaatcggtgacccgcgcgcctatgtgctgccggatgtgatctgtgatttcagccaggtcaaactgcagcaacaaggcaaacatgcggtgcgcctgcacggcgccaagggcctgccacccaccgaccagtacaaggtcagcgccacctaccccgatggttttcgctgtaccgccagttgcctgatcgccggcatcgacgcggtggccaaggccgagcgggtcagccaggcgctcatcaacaagacctcggagctgttcagccagcgcggctgggcgccctacaccgacgtcaacatcgaactgctcggcagcgaagccacctacggcgcccacgcccggcgtgcggattgccgcgaagtagtggtgaagctggcggtgcggcacccgaacaagcaggcgctggcgctgttcgcccgcgagatcgcccaggcggccaccggcatggcaccggggctgaccggcattgtcggcgggcggccgacggtgtatccgctgattcggctgttttcgttcctggtcgacaaatcattgtgtagcgtcgccatcgagtaccaaggccaacgttatgccgtcgagctgcccgcctccgcgcctctgctcacgccggctgcgcccatcgagccggccaagcccctgggccgtgccgatgccagcgtaccgctggtgaaactcgccgtggcgcgctctggtgacaagggcaaccacagcaatatcggggtgatcgcccgccaccccgactacctgccgtggatcgccgaagccctgaccccggaggtgatcgtcgactggatggaccacgtgctcgacccgatccatggccgcgtcgaacgctggtacttgcccggcagccacagcctcaacttcctgctggaaaacgccctgggcggcggcggcatcgccagcctgcgcatagatccccaaggcaaggctttcgcccagcaactgctggaaatccccatcgccgtaccgcaacacattgccgatcaactcagctaaaggaccgttgccgtggccttcgactcgatcttcaaagccgacctgttccaggggcacaccctgatcgtcaccggtggcggcagtggcattggccgctgcaccgcccatgaactggcggcgcttggcgcccgcgtgatcctggtggggcgcaagccggacaagttgcaacaggtagcccaggaaattacccaagacggcggcgtcgcccattggcaggcctgtgacatccgcgatgaagaggcggtgaaggcactggtcacgcaagttctgcacgaccacggccccattcatggcctggtgaataacgccggcggccaatacccgtcgcccctggccgcgatcaaccagaagggctttgaaaccgtactgcgcaccaacctggtgggcggtttcctgatggcacgggaagtgttcaaccagtcgatgagcaagcacggcggcgcaatcgtcaacatgctcgccgacatgtggggcggcatgcccggcatgggccactccggcgcggcgcgctccggcatggacaacttcaccaagaccgccgcgtttgagtggggctatgccggggtgcgcgtcaacgccgtggcgcctggctggatcgcctccagcggcatggacacctacgaaggcgccttcaaggcggtgattcccaccctgcgtgagcatgtaccgctcaagcgcatcggcaccgagtcggaagtcagcgcggccatcgtcttcctgctcagcccggctgcggccttcatcagcggcagcaccctgcgcatcgacggcgccgccagcctgggtagccgcgcatggccgctgcacaaggcgcaggtaccgagcgagccgttcaatgggttccaccgcgcctacctgccggatgtgctcaaggcggagcaataacgccatgccagtcattgaaaccctgatcgaccccaacagcccagcgttcgcgcaaaaccgcgaagccatgctggcgtccatcgcccagttgcgccaactggaacacaccctgctggccaaggcccaggaagccaagcccaagttcgacaagcgcgggcaattgctgccccgtgagcgcctcaatctgctgctggaccccggcgcgccgttcctggagctggccagcctggccggctacaagctccacgacgacaaagacggcagcgccgctggtggcgggctgatcgccggcatcggttacgtcagcggcgtgcgcatgctggtggtggccaacaacagcgcgatcaaaggcggcaccatttccccctccgggctgaagaaatccctgcgcctgcaacagatcgccatggagaacaaattgccggtggtgactctcgccgaaagcggcggcgccaacctcaactacgccgccgagattttcgtcgaaggcgcacgcagttttgccaaccaggcgcgcatgtcggccatgggcttgccgcagatcaccgtggtacacggctcggccacggccggcggtgcgtatcagccgggcttgtcggattacgtggtggtggtgcgcggcaaggccaagctgttcctcgccgggccaccgttgctcaaggccgccactggcgaagtcgccaccgatgaagaactggggggcgcgcagatgcacgcgcaaaccgccggcaccgctgagtacctggcccaggacgatgccgatggcgtgcgcatcgtgcgtgaaattgtaggcctgctgccctggaatgaccgcttgccgcacgccccccagcgcgcctatcgcgaaccgctgtacccgattgaggaactgttggggctgatccccgatgacccgaaaaaaccctacgacgtgcgcgaaatcctggcgcgcctggccgacggttccaacctgctggaattcaagggcgagttcgacccccacaccgtctgcggtcacttgcatatccaggggcgcgctgtgggcgtgatcggcaataacggccccatcacgccgaagggcgcgagcaaggccgcgcagtttatccagctgtgcgaccaaagccgcacgccgctgctgtttttgcacaacaccaccggctttatggtgggcaccgagtcggaacagcaaggggtgatcaagcacggcgcgaagatgatccaggcagtggccaacgcccgagtgcctaaactcaccatcgtggtcggtggctcctacggtgccggcaactacgcaatgtgcggccgcggcctcgacccacgctttatcttcgcgtggcccaacagccgcacggcagtgatgggcggcgcacaggccggtaaggtgctgcgcattgtcaccgaggccaagcaactcaaggacggcctggtgcccgaccccaaggtgctcgacatgctcgaacaggtcaccgcgcagaaactcgacagccagtccaccgccctctacgccagcgccaacctgtgggacgacgggctgattgatccacgggacacccgcactttgctcggttttttgctggatatctgtcacgaagccgaacggcggcaactgcaacccaacaccttcggcgtagcgcgctgatcgttcccacgctccgcgtggtaacgcagaccaggacgctccgcgtcccaaccgggagaacaataaaaatgatcttcacccaggaacaccaggaactgcgccgcaccgtgcgcgccttcgtcgaccgcgagatcaacccgcacgtggatgaatgggaaaaagccgggcgctttcccattcacgagatcttccgcaaagccggcgacctcggcctgctgggcatctccaaaccggaaaaattcggcggcatgggcctggactacagctattccatcgtcgccgccgaagagttcggcaccatccgttgcggcggcattcccatgtccatcggcgtgcagactgatatgtgcaccccggccctggcgcgcttcggctccgatgaactgcgcgaggagttcctgcgcccggccatcagcggcgaacaggtcggctgcatcggcgtctcggaaaccggtgccggctccgatgtggccgggctcaagacccatgcgcgcaaggatggcgatgactatgtgatcaacggcagcaagatgtggatcaccaattcgcccagcgccgacttcatctgcctgctggccaacacgtccgacgacaaaccgcatatcaacaagtcgctgatcatggtgccgatgaacagccccggcatcagcgtcagcccgccgttggaaaaactcggcatgcacagctccgagaccgcccaggtgtttttcgacggcgtgcgcgtgccgcaacgcaaccgcatcggccatgaaggcgcgggcttcatgatgcagatgttgcagttccaggaagaacgcctgttcggcgcggccaatatgatcaagggcctggagcactgcatcgacagcaccatcgaatactgcaaagagcgccagaccttcggcaaagcgctcattgataaccaggtgatccactttcgcctggcagaactggccaccgaaatcgaatgcctgcgcgccttggtctaccaggccaccgagcagtacatcaagggccaggacgtcacgcggctggcctccatggccaagctcaaggccgggcgcctgggccgtgaggtcagcgacagttgcctgcaatattggggcggcatgggcttcatgtgggacaacccggtagcccgcgcctatcgcgacgtgcgcctggtgtcgattggcggcggtgccgacgaaatcatgctgggcatcatctgcaaactgatgggcaccctgcccggtaaaaagccatgaataccttgctgctcgaagcccataacggcgtgctgcacatcaccctcaaccgccccgaatgtcgcaatgcgatgagccttgaaatggtcaatgaactgcgtgcggtactggcgcagttggacagccaggtgcgcgccgtggtgatcagcggcgcgggcgggcatttttgcgcgggggccgatgtgaaggacctggccggcgccggggggcagttgcaagcattgaaccgcgcgtttggcaccttgctgcaagaggttcaggcgctggcgcaggtggtgatcgtggtgctgcaaggcgcggtactgggcggtgggttcgggctggcgtgcgtaagtgatattgcgattgcagcgggccaggcgcagttcggcttgcccgagacccgcctcgggttgctgccggcgcagattgcgccgtttgtggtcaagcgtattggccttacccacacgcggcgcctggcgctgacggcggcgcggtttgatggggtggaggctgggcggctgggggtggtgcattttgtcgagcacgactcgcaggcattggcgcagcgggtggatgaggtattggggcaggtgttgcagtgtgcgccgggggcgaacgcacggactaaagcgctgttgctggccagcctggatgagccgcttgagaccgtgctggatcgcggggcgcagtggtttgccgaggcggtgaggagtgaggaaggggttgaggggacgcaggcgtttgtgcagaagcgaaagccgagttggtctcgatgacgccatcgcaggcaagccagctcccacaggggaacacatttcaaatgtgggagctggcttgcctgcgaagaggccccaacacacgccacattcatcaagggataacccaatgcccgcattcagcaagatcctgatcgccaaccgcggcgaaatcgcctgccgcatccagcgcactgcccaggccctgggctaccgcaccgtggccgtgtacagcgacgcggataccgatgccctgcacgtgcagatggccgacgaagccgtacacatcggcccggcgcccgtacaccagtcctacctgaacacacaggccatcctcgccgccgcccaactgaccggcgccgatgccattcaccccggctacggcttcctctcggaaaaccccgacttcgcccgcgcctgccagcaggccacgctcaccttcatcggccccagtgtcgaggcgatcgaactgatgggcagcaaacgcctgtccaaactcgccatgctcgacgccggcgtgccctgcatcgccggctaccagggcagtgcccaggacgacgccaccttgcaacaggaagccgaacgcatcggcttcccgctgatgatcaaagccagcgccggtggcggtgggcgtggcatgcgcctggtgtaccagcgcgaacagctgctggagcaactgcgcaccgcacgctcggaagccatgaatgcgttcggcagcgacgagctgatcctcgaacaggcgctgatcgacccgcgccacgtggaagtgcaactgttcggcgacagccatggcaacctcatctacctcggcgagcgcgactgttcgatccagcgccgccaccagaaagtcatcgaagaagcgccctgccccgtgatgacgcccgaactgcgccaggccatgggcgaggccgcactcaaggccgggcgggcggtgaattatgtgggcgcaggcaccgtggagtttctgctcgaccgcaacggccagttctatttcctggaaatgaacacgcgcctgcaagtggaacatcccgttaccgagatgatcaccggcctcgacctggtggactggcagttgcagatcgccgccgggcaagcgctgccacttacccaatcacaggtgaccctgaccggccacgccatggaagtgcgcctgtacgccgaagacccggcccagggcttcctgccgcaaaccggtgacgtgttgcgctgggaacccgcccccggcgtgcgcatcgaccatggcttgcgtgaaggccaaaccatcagcccgttctacgacccgatgctgggcaagatcatcgcccacggcgccagccgcgaagaagcccggcgcaaattgctgcgggccgtggaagacacggtgttactcggcgtggcgaccaaccagcgcttgctcatcgacctgctcaagcacccggactttatcgccggcgacttcagcacgggcttgatcgccgaacacttcagcgtcatcccacagcacaaagcgaccgctgaacagctctcgctggccgccgggctgttttatcaacacagcgccaaccagcactcacaccccctcgcgcgctggcgcaacacggcgagtgccccggtgacataccgcctggagatcaacggccaactccatagcgtgaccattgacgacctgccactcaccaccgacggtcgccacgccacctttgtcatcaagggggttcgccgccgcatcgcctatcacctggacggcaaccggctgtggctgccagggctgaccgtcaccgaccgcacccagcaagtcgccagccgcccggccgacgccagcagtggcacggtccaggcacccatggacggcgccatcgtcgatatacgggtgtgcgtcggtgaaagcgtcagcaaaggccagcttttgctggtgctcgaagcgatgaaaatggagcacccgttgaaggccggtatcgatggcacggtcaaggaactgcgggtcgtgacgggcgatcaggtacgcaaccgccaggttttgctcgagatcgaataacgcccctaggcggaactacagggccgggctacgctctatccccatcaggaagggacgagtacgggaacctgcacatgcctcattggctgattattgaccttgaagccacaacggatgacggcggctggcccgtgacagagatggaagtcatcgagatcggcgccagcctggtcaaccgccagggccgcgaactggaccacttccagcgctttgtgcggcccttgcggcggcccttgctgacgcccttttgccgcaaactcacccatatcacccaggccaatatcgacatggccgcgccgatcaccgaggtgtggccgctgttcgagcgctggctgggccaacatcagccacgcctggaaggctgggccagttggggggattatgaccgcgtgcagcttgagctggagtggcagcgccatggcctcgccagcgccctgggcgacaccccgcatgtgaacctcaagcaacgctttgccaaggcccggcgcctggacaaaccgctggggctcaatggtgcgctgcaattggcggggatgcagttccatggccagcagcatcgcgccctggaggatgcccgcaataccgcgcgcctgctgcccttgattttgccggtctaggcagcgcttgcagccttgggcatactggccagccattttcctgctgccctgtaggagcgagcttgctcgcgaagatcgccgatgataacgcagcgcctctggttaaacgcagtgttctcaggtttttcgcgagcaagctcgcgcctacagtggttggcgtaagccttgacctttttccgaggattcacccatgttcaaagtcaacgagtacttcgacggcaccgtcaagtcgatcgctttcggcaccgcagaaggtccggcgaccatcggcgtgatggctccgggtgaatacgaattcggcaccgcccaacgcgaaatcatgcacgtggtctccggcgccctgaccgtgaagctgcctgagagcagcgactgggaaaccttcgctgccggcagccagttccacgtcccggccaacagcaagttccagttgaaggtcgcggtggacaccgcttacctgtgtgaataccgcggctaaggcactacccgacacacaaaaaagcccgtctcccacgagacgggcttttttattccaacaccgttaccggcatgccgacttccaggcgcccaatgccatcgttgaccaggttctggccgaacatcgcgcccttttcggtcttgcggtaggtttccagcgtcgcaaagggctcgcggtcggggctgcgctcaccggtctgggggtcgatggtggtgaggatgcaccgcgagcacggcttgaccacccgaaactccacgtcgccaatgcgcacgcgcttccagccatcttcggcgaaggcctcggcgccttcgatcaccaggttgggacgaaaacgcagcatctccatcgggcggccgatcttcgtacacaggtcgtcgagggagccctggccgatcaacagcaacgggtagccgtcagcgaagccgaccttgtcgtcatccttgccatacccggcttcggtggtgcgcgcacgttccaggggcagttgcaccaggcgcgtcggcttgccaatgaactcgctgacccaggctgcggccgcatcgccagcatccggcacacgcagggtgtcacgccagatggtcacaccgcgcagttcgctggcgctgccaggcattgccacgtccagcggcgcgtagcccggcgaactcagagtcaggcccccgctgctgttccacaacgcgatgagctggctcatcttcgccaccgcccgttgcgtcaggaaccgcccgctggcttcatccaccagcatccagcgtcgatccccgtccaacccgagtttatccaggccaatctgctgcaaggcttgggccttgccggacttcaaggggtaacggtacaacgcgctgagacgcagcatgggcctgccttcctaggaaacaaagtgtcatcctaaagtcaggcgggcatttcgtccaacatcagtcgctggcgcaccacgtccaccagcttgtccggctggaatttggagaggaaattgtcgcagccgaccttcttgaccatggagtcgttgaagctgcccgacaacgaggtgtgcatcaccacataaaggccacgcaggcgcgggtcgttgcggatctcggtggtgagacggtagccatccatttcgggcatttcggcgtcggtgaagatcatcagcagtttgtcggtcatcacctggccgctgtcggcccaggccttgagcatattcagtgccttgaggccgtcgctggcaatgtgcatcttcacgcccaactggcccagggtgtcacgcaactgcgacaaggccacgttggaatcatccaccagcagcacttcgcggccacgggcacgctccagcaccgggtcttcaagtttgtcccgggagaccttggcgttgtagggcacgatctcggcgaggactttttccacgtcgatgatttccaccagttgctcatcgaccttgctgatggcggtgaggtagtgctggcgaccggcgctggtcggcggcggcaggatggcttcccagttcatgttgacgatgcggtcgacgccacccaccaggaacgcctgcaccgagcgattatattcggtgacgataatggtgctgttggggcccggcaccaaagggcgcatgccgatggcctgggacaggtcgatcaccggcagggtctggccacgcaggttgaccaccccgcacacgaacgggtggcgctggggcatcagggtcagcttgggcagttgcaggacttcctgcaccttgaacacgttgatcgcgaacaactgccgtccgaagaggcggaacatgagaatttccaggcgattctcacccaccaattgcgtgcgttgatctaccgtgtcgagaatgccggccattaaaaactcctggtgtacacgccgcaggcgcgttgaaagggtgtgcagctgtataagcacgttatcggcggcaagcgccggaccttgaccccaataaaatgccatgcaaacccattgatgtcacactgacatcatgctttactgcttgggcccttgagcctctttcaagccccccttgcgcgacagtcgaattgacgtgcagttccacgacataggggattcccctatgcgcaatcaggcccaacctgatattcgcgatatctaatagccattaatgtgacgccattctcattgcatgaatggagtcaggcttttgtttgccatccccagcccttggcccacgggcctttcaggcactcacgtaccggcaactgaagtcgtgtcatcccgcacaaccggggctacatacgactttcgtgagcatttcactaaatgtcctactgaaatatcagaatcgacctacaagtccgagccgtatttcagcgctagttttacgccattcacccggtgcgacatctcatcacccgaccttacgttgcggagacctgcatgatgaacgacggtaacgagtggcaacttgcacttcccgagttcctgcacgaggctgaaaagctgctgatcaggtcagaagagtgcttgaaccacctgcatttgattcgaaacgacagtgacgctatcgactgcatgaaagccagcctgaacaagctcgccgagagcgcagactgccttgcattgcaggccattagcgagttttcccggcagattcaatacttgattgccaatgccgtgagcccggtgcaattgcatgaccaggcgctggatgccttgcatgactgcttgacgctactggcctggcaactggaactgatcgatatccgtactggcaagcttagtctggatgaagaagagcaatcatcgttgattgaggcggtcagcttgcagatcccgcaaaaagcccaccaatacactgcgcagcatgatcggcgcgcccaataaatatcaattagctatcaatgcaataacgatacaaaccaacttcattaatacaactttccattttgaactctggggtgcccgcccagagtactcgcgtgggtcataacccaatcagacgaccaacgctaataggggtgttactatgcgcccccgaagtgatttaacttcaacaggcttaaaaacgatttggcagcgcactccaaacagagcccggtcaaccggcctccccgcagtgaaccctcattggctccatccgctatgtacgccagtttcaagtcacttatcgtcaggtccttgtcccgcagccacgcgtgccaccttgccctttcgctgtgcctgtgctcgttgttggccagcctgtgggcctatctgatgggcgcgccgctgccattgctgatcgtgctgctcaacctcgccacgctgatggtggtgggcctgcaacagtggcgctcgcgcagagctatcaagttcgagccccaggaactggccgcccgcctgctgcaagttcaggagaacgaacgtcaccggctcagccgcgaactgcatgatgacatcggccagttactgacagccgccaagctgcaaagtgaatggctgcagcgccgcctgccccaggatctgcaagaccattgctcggtgctgtgcaataccctcaatgaaaccctggccaaggtacgtgacgtatccgccatcctcaacccgcgccaactgaccagcctgggcctggaagccagcctgcgcgcgcacctgctcaaggccctggaaaacacccaggtgtgctggagcctggagtgccaccaacggctcaccggcatccccgaagaaatggccgtggcggcctttcgcgtcactcaggaagcggtgaccaacatgcttcgccatgcaaaggcgcgcaacctgctggtgcgtctgcaacgcctgcctgaaggcttgtcgctgatgatctgcgatgacggccaggggttcttgcctgccctcgatccgggccgggaaggccaacggggcatggccggtatgtgcgaacgaacacaccagctgggaggctccttttccgtcagcagcgagcccggcaaaggtacacgcatcaacgcacttttcccttgggcgccccgcgctctcgaacgggctagcgcccctaaggttctcgagtgacctgcaatttactcctggtagacgaccacgcactgattcgcgccggcgtgcgcgcgctgattctggatattcccggctacagcgtcatcggcgaagccagcgatggcgcgcaattgctggagcaatacagtgccttgcagccggatatcgtgctgctcgacctgtcgatgaagcacaccggcgggctgaatgccttgcagcaactcaagcgtttttaccccacgtgcaaggtactgattctgtcgatgcacaccgagccggacctgatcatgcgcgcactggagtccggcgcccacggctacctgctcaaggacaccaccgccaatgagctggaacacgccctgctggccctgcgcaacaacgaacgctacctgagccccgccatcgcccacacagtgatcaaccaggcgctgatccgtagccaggtccccaacgcgcctgtcgcccacagccacaacctgacggcgcggcaactggagattttgcgcttgatcgtgcgcggtaaatccacccgggaaattgcccacggtctgggcctgagtatcaagaccgtcgaagcccaccgctcgcagatcatgaagcgcttgcagatttttgacgtggcgggcctggtgttatttgccgtgcgtgagcagatcatcagcctggacgactaacggcgagcccagcggcaagtgcacgcgcagggccttgggcagtgcctcgaaatgcaggtcgtcgccttccagcggctcaccgtcgaggttgatgtacaagccctgtgccaccttgatcttcacccacggcaggcgtgcgcgcacaaacatggtgtccaggccccagccgttgttcatcaactcacgcagcgtgccaaccacttcctggggcgccggcagaatgctgacatccagcagcccgtcatcagccaatgcaccggggcacaacacatgcccgccaccggcctggcgaccgttaccgatgcccagcgcgagcaactcgcctttccaatggaaatccgggccttccaattcaccgtaggcggctttcaattcactgaagcgggataaaccggtgaacaggtaagcggcaccgcccaaaaccttcttcaaatcttcggaggtattggccgtgacctggctgccaaaaccaccggtggccatattcaggaagatttgcccacccacctggccaaggtcgatggccctgggctgcacgtccagcaaggccaacgcaccagccggctccaacggcacgccggccgccttggcgaaatcattggcggtgcccaggggcatcagcaccaggctggcgtcagtgttggcatgggccatggcttcagccacatcgcgcaaggtgccgtcgccaccgccggcaatgatgtgggtgtagcccgcggccaaggcttcattgaccaggcgctgagcatcgccgccctcccacgtcacccgcacggccaactccccaccctgctcccgccgcgccagcacggcagcgcgcacatcctcgttgagggcttgtttgccgtgaaggatcaacagggctttgggggcggtcatttgagggtatctcctgggtctaggtgcttgaaggatgttgacctttgaggaacaggaaaagtctgtgggctgaagaaaattgattgaagtacacagatcaaaattgtgggagctggcttgcctgcgatggcggcagctcaatcgacaaacatctcaaatctgccacccaacggtaaccgcgatgcgaagcgagccgctcttgatcttgatctgcttttgatctcaggccgccttcgcgagcaagcccgcacacagttggattgtggggtatcaggtagatagatgtcggctggtaggccgtcatcgcaggcaagccagctcccacagttagattgtggggtgtcaggtagatatggggcggctggcaggccgtcatcgcaagccagctcccacagttggatcgctgcggcggccaggccgcgtcgagaatcagctcttgtgcaacttgctcatcaactgcgcctcagcctgggtcaacccacacgactgggtcagctcatccaccgtcgcccccatgccaaccagcttggccgcctgggcaaacgacaggttcgacggatcacgctgctccaactgcaccaacctgtccggcaacggcgcaagcatcgcacgcagttcatgcacctcatcccccacccgcaccgcactttgctggtaatgatcaacgcgcttgaccagttccagaatgcgccggtcacgcaccgcatcgcgctcggcctgttgcaaggccaactcccgctgctggcgcacatagcgcagcacaaacgccaaggtcccggcccataacagggccaggacaatcaccgctgcctcaaggaacaatcagatgctctccagttccgaccactcttcttcgctcatcatcttgtccagctcaaccagaatcagcagttcgccgttcttgttgcacacgccctggatgaacttggccgactcttcgttaccgacgttcggtgcggtttccacttccgattggcgcaggtaaaccacctcggccacgctgtcgaccaggatgccgaccacttgcttgtcggcctcgatgatcacgatacgggtgttgtcgctgacttcaaccgtgtccaggccgaaacgctggcgggtgtcgatcaccgtcaccacgttgccgcgcaggttgatgatgcccagcacgtagcttggcgcgcctggaaccggggcgatctcggtgtagcgcagcacttcctgcacgcgcatcacgttaatgccgtaggtttcgttgtccagcttgaaggtcacccattgcaggatcggatcatccaaaccttgtgcggacgctgacttgttcattcatctgaccccttcaaatgccgctatcgacggcgtgtgtgcaagtgggccgcgcaaccgcacggcccttattgttcaatcaactgcgtttgttctgtggcatcgccttcaccgcaccgctggcgatcaactcggccagttcggcgacatccagcaacgcgcacatgtgttcgatcacagtgcccgccaaccacggccgctggccacggtggctgcgccatttgatttcattggggtccaggcgcaacgagcggctgacttgatgcactgccagcccccactcgtagccctgcacggagatcacgtattgcaggccctggcgaaaatcatcgcggtagcggtcgggcatcacccagcgcgccgtgtccagcaccttgaggttgccggcctggctgggcaggatgccgaggaaccactctggctgcccgaacaacggcgtcagctcctggccttccagggaatagatcgagcccaggcacaccaacggcaccgccagggtcaacccggcgacgtcgaacagcaggcactcgaacggctcggcagcccacgaagggcgaccgtcgcccgtcaccggtggcggcgtgatgctgggcggcaggtgcacgtccaccagcggttcgaccaccgggggcgccaccactgccggagcgctcggcaccacgacgggcgcctccacccccttcgcatcccgcgcctgctcttccatcactgcctgctggaattcatccagcgggctgtcgggctcaacagcaggctcaagcaccagaatcggttctggcagttcctcggccgtcgcgtcctgcagcaaggcatccaggtaggattccagtgcgagttgcggccgggtcttgaattcgacaggacggttcatcacgccacctgcgccacaagttgttgcgacagcaggtgcttgagcaacgcacggtaggccagcacgccacggctcttgccgtcgaactgcgacggtgtgagcccggcacggctggcgtcacgcaggcgcgtgtccaccgggatgtagccgttccagatggtgtccgggtaggcatcgcgcaacacgcgcaaggtaccgagggacgcctgagtgcgacggtcgaacaaggtcggcacgatgctgaacggcagcgcctgcttgcgcgagcggttgatcatcgccagggtgctgaccatgcgctccaggcccttgaccgccaagtgctcggtctgcaccgggatcaccaattgctggctggccgccaacgcgttgaccatcagcacgccgagcaacggcgggctgtcgatgatcgcgtaatcgaagtcctgccaaagctgcgccagggtcttggcgatcaccaggcccaggccgctctggcctggcgactggcgctccagggtggccagggcggtgctcgacggcagcagggaaatactgtcgttgctggtgggcaacagcagttgcccaggcagatccgccggcacgctgcccttgtgcaaaaacaggtcatagcaactatgttccagcgcatccgggtcgtagccgaaatagctggtcatggaaccgtgggggtccaggtcgaccacgaccacacgcttgcccgcttcggccagcaaaccggccaaggcgatggaagtggtggtcttgccgactccacccttttgattggcaactgcccagactctcattcggttggttcctcccggcgggcacaggcgcgaccgagacattgcatacggttattgagccggcgacggagaattgacgttactcggtcggaccggcggcttgacaacgggcggtgcagtttgtgtgccagcacgcttcaacgccgcatccggggtggcattggcggtgccggttccggtcaggctgcgacgcacatccaggttgcgcgagaccaccagcaccacccggcggttacgggcgcggccttcgaccgtggcgttattggccaccggctggaattcaccatagcccaccgacgccaggcgctgggggttcacgccctgcatggccaacatgcgcacgatgctcgacgcacgggccgaggacagttcccagttggtcggatactgcgcagtgctgatagggaaattgtcggtgaagccttccacatggatcgggttttcaaacggtttgaggattgccgcgaccttgtcgatgatggtgaatgcctggtcactgggcaacgcatcggcactggcgaacaacaggctggagttcaattcgatctccacccacagctcattgccgcgcacggtcatctggttggaactgatcaagtcgccaaaggcagcactgatatcgtcggcgatgcttttgagcgggtcgctggtgccttggatgccggcggcggtttcatcactgtcattgaccagaggcttggccggggtcacggtcttgggccgctcttcgccgatggggatcggcttgagcgcccgctcggaatcgttgaatacacccaccagcgcctgggaaatgatcttgtacttgccttcgttgatcgacgagatcgagtacatcaccacaaaaaacgcgaacagcaaggtgatgaagtccgcgtaggacaccaaccagcgttcgtggttgacgtgttcctcgggctcgcgacggcgacggctcacaggcagttcctccccatcaatccatgaagccctgaagcttcaattcgatggagcgcgggttttcgccctcggcaatcgacaggatgccttcaagcagcatttcgcgataacgcgactggcgcatggcaatcgacttgagcttgctggccaccggcagcaacaccaggttggcactggccacgccgtagatggtcgcgacaaacgccacggcaatgccgctgcccagttgcgaggggtcggccaggttgcccatcacgtggatcaggcccatcaccgcaccgataatgccgatggtcggcgcgtagccgcccatgctttcaaagactttggccgcattgatgtcacggctttcctgggtgtagaaatccacttcgaggatgctgcggatcgcttccggttcggcaccatcgaccaacagttgcaggcccttgcgcgcgtagctgtcaggctcggcatccgccacgccttccaggcccagcaggccttccttgcgggcggtgaggctccaattgaccacgcggtcgatgccgcctgccaggtcgacccgtggcggaaaaatgatccacaccagaatctgcatggcacgcttgaacgagctcaggggcgactgcaacaacgccgcacccacggtaccaccgatcacgatcagggctgccgggccgttggccaaggcgccgaggtggccgccttccaggtagttgccaccaatgatggcgacaaacgccatggtgatgccgatcaggctcaagacatccatcagaggcaggcctccaccaggtgcttgccgatgtcgtccagactgtagaccgcatcggccaggtcagccttgacgatagccatgggcatgccatagatcacgcaactggcctcatcctgggcccagatggcgctgccgccctgcttgagcaggcgcgcaccttcacggccatcggcgcccatgccggtgagcaccaccgccagaactttgtcgccataggacttggctgccgaaccgaaggtgatgtccacgcacggcttgtagttcaagcgctcatcgcccggcaggattttgatcgcgccacgcccgtccaccatcatctgcttgccgcccggcgccagcagtgccaggccagggcgcaggatgtcgccatcctcggcttccttgacggtgatacggcacagcttgtccaggcgctcggcgaacgccttggtgaacgccgccggcatgtgttgtaccagcacaatcggcgccgggaagttagccggcagttgggtcagcacccgctgcaaggccaccgggccaccggtggaggtgccgatggcgaccagcttgtaagccttgcgcttgggtgccggcgaatgcgcactcggcgctgcggcggcacgtaccggcgctaccgcaggccgggccacgggcgcaagcgccgggcgcgcaaacgatgagctcggcgccgctgcggcgggcgcaggcgtaggggctggcgcgggtgtgctgaacaggctgcgacggttactgcgggaaatgctgtgcaccttctcgcacagcatctgcttgaccttgtcggggttgcgcgagatgtcttcgaaattcttcggcaaaaaatccaccgcgccggcgtccaaggcgtcgagggtcacccgcgcgccttcgtgagtcagcgaggaaaacatcaataccggtgtggggcagcgttgcatgatgtggcgcacggccgtgatgccatccatcatcggcatctcgtagtccatggtgatcacgtccggcttcaaggcaatggcttgatcgatcgcctctttgccgttagtggccgtgccgaccacctggatcgttggatcagcggaaagaatttccgagacgcggcggcggaagaaacccgaatcgtccaccaccaggaccttgactgccataaacactccgttaggcggggcgggcatgaccgccctgccccaccagaatcaaatacgccgtgcggcgtaacgcttgagcatgctcggaacatcgagaatcagtgcgatgcgaccgtcaccggtaatggttgcgcccgacatgcctggggtgccctgcaacatcttgcccaaaggcttgatcaccacttcttcctggcccaccagttggtcgaccacaaagccgatgcgctgggtgcccacggacagaattaccacatggccttcgcgctgttcttcatgggcagccgaggccaccagccaacgcttgaggtagaacagcggcaacgctttgtcgcgcacgatcaccacttcctggccgtccaccacgttggtgcgcgacaagtcgaggtggaagatctcgttgacgttgaccagcgggaaggcgaacgcctggttgcccagcatcaccatcagggtcggcatgatcgcgagagtcaacggcaccttgatgacgatcttggagccctgacccttggtcgagtagatattgatcgagccgttgagctggctgatcttggtcttcaccacgtccatgcccacgccacgcccggacacgtcggagatctcggtcttggtcgaaaaccccggggcgaagatcaggttgtagcactcggtgtcggtcaggcggtcggcggcgtccttgtccatcacaccgcgcttgaccgcgatattgcgcaagatggtcgggtccatgcctttgccgtcatcggtgatcgacagcaggatgtggtcgccctcttgctccgccgccaaaatcactttgccgttgcgggacttgccggcggcttcgcgttcttccggggtttctacgccgtggtcgaccgcgttgcgcaccaagtggaccagcgggtcggccagggcctcgacaaggtttttgtcgaggtcggtttcttcgcccaccagttccaggttgatttctttcttgagctggcgcgccaggtcgcgaaccaggcgtgggaaacggccgaagactttcttgatcggctgcatccgcgttttcatcaccgcggtttgcaggtcggcggtgaccacgtcaaggttcgacacggccttctgcatggcttcgtcgccgctgttcaggcccaggcgcaccagacggttacgcaccagcaccagttcgcccaccatgttcatgatgtcgtccaggcgcgcggtatccacacgcacggtggtttcggcttcgctggcgggcttttccgcaacagccggcgccgctgcacgcgcaggggcggcggcgggtgctggcttggcagccggcgcaggtttggcagcaaccggtgccgcagtagcagcggctggcgctgcaaccggggcggcagcggccggggccacttcgctgaacttgcctttgccgtgcaactcgtcgagcagggcttcgaattcgtggtcggagatcaacccgtcaccggccggtgcggtactggccgctggcgcagcggcggcggcagtcgctgcaacctcgggcagggcttcggccacaaaggtgcctttgccatgcagttggtcgagcagtgcctcgaattcgtcgtcggtaatgtcggtgctggcgttggcagcgggtgcttctggcgctgccgcaggcggtgccacggcatctgctgcgaactggcctttgccgtgcaactggtcgagcaacgactcgaactcagcgtcggtaatgtcttcactgctcggcgtcgcggcaggctgcaccggcgattcagcttcggccttgaccgcgctgagggagttgagcagttgttcgaactcgctgtcggtcacgtccggctcggcttgcgccaccggctccggcgcggcctcgaccaccggcgcagccgcggtgtcggcaggttcggccaggcgcgccagggcggccagcagttccggtgtggcggcggtgataggcgcacgttcacgcacctggctgaacatgccgttgaccgcatccagtgcttcgagaatcacgtccatcagttccgagtcgacgtgacgctcacccttgcgcaggatgtcgaacacgttctcggcgatgtgacagcactccaccagctcatggagctggaggaagccggcgcccccttttacagtgtgaaaaccgcgaaaaattgcattgagcaggttcgcatcatccggtcggctttccagctcgaccagttgttcggacagttgctctagaatttcgccggcctctacaaggaaatcctgaaggatttcttcatcggcgccgaagctcatgtgggtgctccttagaagcctaaactggataacaggttatctacgtcatcctgacctgacacaacgtcttcacgtttatcggcatgaatctgcggaccttcacccttggcgagatgtttttgtggatctttttccgagaggatcgcttcgcggtcatgttcgatgccggcaaaacgatcgacctggccggccatcagcaccaatttgagcaagttgctttccacttcggtgaccaactgggtcacgcgcttgatcacctggccggtaaggtcctggtaatcctgggccagcaggatgtcgttgaggttgctggccaccgtgcggttttcctgttcgctgcgcgacaagaacccgtcgacgcgacgcgccaattcacgaaactcttcagcaccgacttcgcggcgcatgaagcggccccagtcctggctcaaggcctgggcttcggtggccatgccgttgaccaggggcgtggcgttttccaccaggtccatggtgcggttggccgccgcttcagtcagccggaccacataggacaggcgctcagtggcatcagtgatctgggaaatttcttcggcctggggcatgcgcgggtcaatctggaaattgacgattgcgctgtgcagctcgcgtgtgagcttgcccacttcctggtacaggccgcggtcacgggtctggttaagctcatggatcaactgcaccgcatcggcgaactggcctttttccaggctgtcgaccaactggtgagcatgttttttcagggtcgactcaaagtcgccctgtgacgtttcgttatgctccatagctcccccgcgatggcattagccgtggatgcgttcgaagattttctcgatcttctctttcaaggccagtgccgtgaatggcttgaccacgtaaccgttgaccccggcttgggcggcttcgatgatctgttcgcgcttggcttcggcggtcaccatcagcacaggcaggctgcgcagtttttcatcggcgcgcacatggcgcagcaggtcgataccggtcatgcccggcatgttccagtcggttaccagaaagtcgatgctcccgctgttgaggatcggaatggccgtcaggccgtcatccgcctcgaccgtgttggtgaacccaaggtcacgcaacaggtttttaatgatccgccgcatcgttgagaagtcatcaacgatgaggattttcatgttcttgtccaattcgacctccaagcagtcttaaacgcgcccagcacctggacgcgccatttcaatcaacaggcattacacaaaaaggactgcccagggcaccacggtactcacccgcaaaaccctgcggtttcacggtagcgtctgcagtgtccccacactgcctgtcagcgcgcgcgccactcggccaatcgcccccgcaagcgggctgcgcactggctatgcaactggctgacacgcgattcgctgacccccaggacctcaccgatttccttgaggttcagctcttcgtcgtagtacagcgccagcaccagccgctcacgctccggcagattggcgattgcatcggccaacgcgccctggaaacgttcgtcttccaggtcgcgcgacggctccgtatgcgcgctcgcgccgtcctcgtgcagcccttcgtgttcgccgtcctgtaaaaggtcgtcgaaactgaacaggcggctgcccaaggtatcgttcaaaatcccgtagtaatcgtcgagactcaattggagttcggccgcaacttcatgatctttagcgtcacgaccggtttttgcttcaattgcacgaattgcatcactgaccatgcgcgtattgcggtgtaccgaacgcggcgcccaatcgcctttacggacttcatcgagcatcgcgccacggatacggatacccgcatacgtttcgaaactggcacccttgctggcgtcgtatttggtcgacacttcaagcaagccgatcatgccggcctggatcaagtcttcgacctgcacactcgcgggcaggcgcgccaacaggtgataggcaatgcgcttgaccaacggcgcatagcgctcgatcaattcgccctggctgtcacgtgccgactttttgtaaaggttgtagccgctggatgtcatagcaccggtcctgcgctcgtctgatgcaccaaacgctcgacgaaaaactccagatgcccccgcgggttggcgggcaacggccaggtatcgaccttctgggcaatggccttgaacgccagtgcacatttcgaacgagggaacgcttcatagaccgcacgctgcttttgcacggccttgcgcacacactcgtcatagggaactgcgccgacgtattgtaaagccacatcgaggaagcgatccgtgaccttggtcaacttggcgaacaggttgcgcccttcctgcgggctctgggccatgttggccagcacgcgaaagcggttcatgccgtagtcacggttaagcagtttgatcagcgcgtaggcatcggtgatcgaggtgggttcgtcgcacaccaccagcagcacttcttgcgcagcgcgcacaaagctgaccacggattcgccaatgccggcggcggtgtcgatcaccagcacgtcgaggttgtcgccgatgtcgctgaacgcctggatcaacccggcatgctgcgcggggctcaggtgcaccatgctctgggtgcccgaggccgccggcacgatgcggatgcctccggggccctggagcagcacatcgcgcagctcacagcggccctcgattacatcggccagggtatgtttgggtgtcagccccagcagaacgtccacgttcgccaaacccaggtcagcatccagcagcatgacgcgacggccaagctctgccagggccagggacaaattcactgacacgttagttttcccgacgccacctttgccgccggtcaccgcgatcacctgtacgggatgcatgctgcccattttatttctttaccttgtcttgcttagacgcaggctacatggcttggccgcgtgaatcgcttgcagaccatcgatgtaggtacatttcacggtgttcatcctgcctcaacccacccgtttagccgggtggtggtaaaggtcggcgaacatatcggccatcgcttcctcgctaggctcgtcttgcatttgcacactcacggcacggctgaccaactgatgacggcgcggcagatgcaaatcatccgggatccgcggcccgtcggtgaggtaggcaaccggtaattcatggctgatggccaggctcaatacctcgcccaggctcgcggtttcgtcgagcttggtgaggatgcaaccggccaggccgcaacgcttgtaactgtgataggcagcggtaagaacctgtttctggctggtggttgcaagcaccaggtaatttttcgattttatgccacggccggccaggctttcgagttgcatgcgcagggccgggtcgctggcttgcaggccggcggtgtcgatcagcaccacgcgcttgcgcagcagcgggtcgagggcattggccagggactggcccgggtcgacatgagtcaccggcacgttgaggatgcgacccagggtcttgagctgctcctgggcgccgatgcggtaactgtccatgctcaccagcgcgatattctgcgcgccgtacttgagcacataacgggcagccagcttggccagggtggtggtcttgcccatgccggcggggccgaccatggcgatcacaccgccctcttccaggggttcgatttccggcgtggcgatcatgcgcgccaagtgcgccagcagcatgcgccaggcctggcggggctcttcgacttcagcggtcaaggccagcaggtcgcgggacaacgggccggacaggccgatacgctgcaggcgacgccacaggttggcttgctgcggcttgctgccttgcagttgggtccaggccagcgagcccagctgcacttcgagcaattcacgcaggccgttgagttcaaaacgcatcgagtcgatcacgcgctggtcaactgcggcagccggggcaggcgctgcaggacgcggcggttcgacaaaggtgggctcaaccagcggctcggcggcggtcagcggcaggccggcaaacaactggcgattggtgctggcatcgctgtcgccacgcatgctcagttcagcctgggccgacacaatgcgcgaggcggtcttgcgcagctcgtcttcgagttccatgttcggtacgcgcggggccagcgcctggggtgtgtaatccagggcagccgtcagctcgacaccgccggcaatccgacggttaccgataatcgcggcatcggcgcccagctcatcgcggaccaatttcatggcctgacgcatatcggcggcgaaaaaacgcttaacttgcataacccactacctcagccattgggcccaactgtcgcgacgatagtcacttgcttattgtcaggaatttcctggtaagccaacacgtgcaaattcggtacagccaggcgtccaaaccgcgacaacatcgcgcgaaccgggccggccaccagcaggatcaccgggttgccctgcatttcctggcgctgtgcggcgtcgatcaacgaacgctgcagcttttcagccatgcttggctccagtaaaacgccctcttcctggccttgccctgccttctgaatactattgagcaatatttgttccaacctgggttccaaggtgatcacaggcagctcggactcagtccctacaatgctttgcacgattgcgcgggacacgccgacacgcaccgccgccaccagagcggcagtatcttgactcttggcggcattgttggcgatggcctcggcaatgctgcgaatgtcgcgcacgggcacctgttcggccaacagcgcttgcaacaccttgagcaactgcgacagcgacaacacgcccggcaccagttcttcggccagtttcggcgacgatttggccagcaagcccatcaattgctggacttcctcgtgaccgatcaactcgtgggagtgcttgtagagaatctggttgaggtgcgtggcgaccacggtgctggcatccaccacggtgtaacccaaagactgcgcctggctgcgctggctcacttcgatccacaccgcttccaggccgaaagccggatctttggcggtgatgccgttgagcgtaccgaacacttgccctgggttgatcgccagttcgcggtctgggtagatctcggcttcggccaggatcacccccatcagcgtcaggcgataggcgctgggggccaggtcgaggttgtcgcgaatatgcacggtgggcatcaggaagcccaagtcctgggacagcttcttgcgcacgcccttgattcgcgccagcagttgcccgccctggttgcggtcgaccagtgggatcaggcggtagccgacttccaggccgatcatgtcgatgggcgtaacgtcatcccagcccagttccttggtttcctgggcacgggccggggatggcagcagctcctgttgacgcgcgatctcctgctcggcctggaccttgacctggttctgcttcttccagaacaggtacgccgcgccacccgccagggccgccatgctcaggaacgagaagtgcggcatgcccggcacgatacccatgatcgccataatgcccgccgccacggccagggccttgggcgaagcgaacatctgccggctgatctgcttgcccatgtcttcggagcccgaagcacgggtaaccatgatggccgccgctgtggataacaacagtgatggcaattgcgccactaaaccgtcaccgatggtcagcaaggcgtacaccttgccggcatcaccgaaggtcatcccgtgctggaagataccgaccgccatgccgccgatcaggttgataaacagaatcaacaggccagcgatggcgtcaccgcgcacaaatttgctggcgccgtccatggagccgtagaactcggcttcctgagcaacttcggcccggcgcgacttggcctggttctggtcgatcaggccggcgttgaggtcggcgtcgatggccatctgcttgccgggcatggcgtcgagggtaaaccgcgcgctcacctcggaaattcgcccagcgcccttggtcaccaccacgaagttgataatcatcaggatcgcaaacaccacgataccaaccacgtagttaccgccgatcaccacctcaccgaacgcctggatcaccttaccggcggccgcgtggccgtcctggccgtggagcatcaccacccgcgtggaagccacgttcaatgccaggcgcaacagggtagccaccagcagaatcgtcgggaataccgcaaaatccagcggccgcagggcgtacacgcacaccagcaggactacgacggacagggcaatgttgaaggtaaagaacacgtcgagcaggaacggcggcatcggcaacatcatcattgccagcatcaccagcaacaacaacggcacacccagattgccccgcgacaagtcagtcagggtgccacgggccgtgttgagcatttgagagcgatctaccaccggtattcctcgggtccttgaagcaaagttttgacgctggagggcgacttggaggcggggttgcaagaagccttccaactttgcttttggagtgatcgtcgggtggtaaccgattcgagtgtgggggctggcttgcctgcgattgcggtgtgtcagccactgggatagtggctgcgagtcagccatcgcaggcaagccagctcccacatttggatttgtgtgcatcgtggatatcgaggaaatttccgacatggatttggggttgcccctaggaaatgtgatctctagtctccgtacaccgctgcaaacgcagcggacgggcgtcgcggcccggttcacaacggagcaaaagcaccatctccctttcagtaagcggttttttatcgtctactgtgcggcgctatggcggctgtgcgcgggataccttcgggtatgccgggttgctccttcaccggtccgcgaacctgcgtacagctgccaccctccatcgcgtcgcggcgatcagtggcggcttcactttcataaggagcttcacagtgatcaaacctaccccaaatccccccacccggctgtttaccgtagccgacggcatcagcagcgaagacctgctggtcaacctcagcgaaacactcgcttcggccaatgccttgagctgtgacctggcctttgacttggaaggttcgaaacgagaggaattgctcggtgttgcgcagttgatcgaactggcgcagttactggctgatcgcttgcacggtgaaggcggaatgttggacaccgcacacagcggataacgcagccccctcgatcgttcccacgctccgcgtgggaatgccgcctgggacgctccgcgtcccgagccaggcgcgcgacttgagcactgcgcaagggcgacgcagagcgtcacgcaatgcattcccacgcgggagcgtgggaacgatcaataatatttacgtcaagctttgaagattttccgcagtgacctttccatccctcccaactacgagatcgtattgcaccttttgcccttctgaaagctctcgcaaacccgaacgttcaactactaaaacatgcacaaaaacgtcatttccaccgtcgtccggagtaataaacccataccctttgggtttgttgtagaacttgaccgtacccgttgccattgccgctctccttacccttactcagaacccaacccacctcgatgatgccctctgacgggcaacgcatagatacccttgggccgatggaccatttgaaacctcagacgcctccccaccgccagcgccgtcttgcgccaatccttgcgattgataaatacctcttcaataacgcggccccctcgatcattcccacgccccgcgctggaatgccgcctgggacgctccgcgtctcgagccagacgtacgacttgagctctgcgcaagggtgacgcagagcgtcacgcgatgccttcccacgcgggagcctgggaacgatcaaacgcaagcagcggataatgcgggcaagccagctcccacatgtgattcagtttttaaactggccgtatattctcagcttgtgggccttttggaccttgtgtgaggtcatactctactttttggttctcttccaaagatcgaaacccactcgacgcaattgccgagtgatgggcgaacacgtccgcccctccatcctccggggtaataaaaccaaaccccttctccgtgctaaaccacttcacagtacccgttgccattgccgctctccttacccttcctcagaacccaatccacctcgatcatgccctctgacgggcaccgcatagatgcccttgggccgatggaccatttgaaacctcagacgcttacccaccgacagcgcggtgcagcgccaatccttgcgattgataaatacctcttctgtcccctcatccaattcgaccagccaatcgcccctgatccagtcgtaggatttgacagtccctttgacctcgctcaatcccgctctccctgcctctcgttgactacatacgtgcagtgtttggttcatccataaaacaatgggaaacgtggtttggctactgtcagagttgacaggtagacgcgagctgccgatgggtggtagcggtggaacagcagacgattcatgcatccgatgatttcttgcgcttgcggggttttcgcggcttggcaggggtgggtggcaagtcactgcattgcgtgcctgccgattggacggcaaccgggttgccatcgcgatcccgggcaataaagccgatgcctttgaccgcatcaaaccacttgaccgtacccctatccatcaccgcctcccgagccgcgcacggttgcgcgcctcatcgctgtatcaaacagtgaaggcggcgtaatggctactgtcaaagttgacaggtagacggccctttctgtaggagcggtcaggaatcgcggcgcaggtctggcgggatcggcaggtctttgagcggatcaggccgcttgcccttgccggcgcggtattggcggatctggtacacgtaggccaacacctgcgccaccgccaggtacaggccggccgggatttcctggtcgaggtcggtggagtagaaaatcgaacgcgccaatgctggcgactccaataacagaatgtcgttggccaccgcgatttcgcggattttcaacgcggtaaagtcgctgcccttggccagcagcatcggcgcgccgcctttctcggggtcgtacttgagggccacggcgtagtgggtcgggttggtgatgaccacgtcggcgtcgggcaccgaggccatcatcttgcgctgagacatttcccgctgcagttggcggatgcgttgcttgacctcggggcggccttcctggtccttgtgttcgtcgcgcacttcctgcttggtcatcagcagtttcttgtggctttcccacaactggatcggcgcatccacggcggcgatcaggatcagcccgagcgccatccacagcgcgctccagcccaccacctgcacgctgtggatgatcgccgactccagcggctcatgggcgatgcgcagcaaatcatcgatgtcggacgacaacaccgccagggccacgaacagaatcaggaaaaacttggccagggccttgagcaattccaccagggccttgaccgaaaacatgcgcttgagccccgccccggggttcatgcggctgaacttgggcgccatgctgcccgcagcaaacagccagccgcccagagccaccgggccgatcagcgcggcgagcaacaaggtgatcagaatcggctgcaccgccagcaacgcgatcttgcccgagtgcagcaggtactgggccatggcgtcggggttgagcaacacttcgcgcggcaggctgaagttatgtttcatcatctccagcaggtccagcgccaggccaccgccgtagatcagcaaggcgccggcgccagcgatcatggtggcgaaggtgttgagctctttggagcgcgcgatctcgcccttttccctggagtcctttttacgtttctccgtggggtcttctgttttgtcctgaccactctcgctctcggccatggctcagcgcgcccgtgccagatcacgtaagaactgcaaggcttcgctcgcaagcggttgatactgattgagaatgtcagccaggccgacccagaaaatccccatgcccaacaccagggtcaaggggaagccaatcgagaagatgttcagttgcggcgccgcacgggtcatcacgccaaacgcgatattgaccaccagcagcgccgtgatcgccggcagcaccagcaacagcgctgcgcccaacacccaaccgaggcgccccaccagctcccagaaatggttgaccaccaaccccgagcccaccggcaaggtggtgaagctttcggtcaagacttcgaacgccaccaggtgaccgttcatggccagaaacagcaaggtcaccagcatggtcagaaactgcccgatcaccgccgccgacaccccgttggtagggtcgaccatggacgcgaagcccatgcccatctggatcgagatgatttgcccggcgatcacaaacgcctggaagaacaacgtgagggaaaaccccagcatggcgccgatcaggatctgctcggcaatcagcagcaaggcgctcaggtcgagggcgttcaccggcggcatcggcggcaggccaggcacgatcaccacggtgatcgccacggcaaaatacaaacgcacgcgacgcggtaccagggtggtgccgaacaccggcatggccatcagcatggccgtgacgcgaaacagcggcaggatgaacgaggccacccaggtactgatctgggtgtcggtcaaggccagcaaggattgcatcggctcagccgatcaactgcggaatactgccgtacaactgcaggatgtattccatgaaggtttgcaccagccatgggccggcgacaatcagggtcaccagcattaccagcaggcgcggcaggaagcttaaggtttgttcgttgatctgggtggccgcctggaacatcgccaccagcaggccgaccaacaggctcggcaccaccagcacggcaaccatcagggtggtcagccacagcgcttcacggaacaggtcgacggcgacttctggcgtcatagcgctatacccctccgaaactgccggccagggtgccaatgatcagcgcccagccgtccaccagcacaaacagcatgatcttgaacggcaacgagatgatcaaaggcgacagcatcatcatacccatggccatcaacacgctcgccaccaccaggtcgatgatcaggaacgggatgaagatcatgaagccgatctggaacgcggtcttcagttcagaggtgacgaacgccggcaccaggatggtcagcggtgcctggtccggggtggcgatgtcggtgcgcttggacaggcgcatgaacagctcaaggtcgctggagcgggtttgcgacagcatgaagtccttgatcgggccctgggccttgtcgatggcatcctgggccgtgagcttttctgccagataaggttgcagggcttgctggttcaccttgtcgaacaccggcgccatgatgaacagcgtcaaaaacagcgccatgccggtgaggatctggttcgacggcgtctgctgcaggcccagggcctggcgcaggatcgagaagacgatgatgatccgcgtaaagctggtcatcagcatgacgaacgccgggataaaactcagcgccgtcatgatcagcaggatctgcaggctgaccgaatattcctgcgcgcccgccgcgttggtgcccagggtgatcgccgggatcgacaacgggtcggcgcccagggccatcggtgcggccagcaacagcatgagcgtcaacaaaacgcgcattacttcttatccttctgatccttgcccagcaactccatcaggcgctgggcgaattctggcgtggcggcttcggtcttgaccgcatccaccggggtcttgagtacatgcagcggggtgatgcggccaggggtgatgccgagcaggatttgctcctcgcccacctgcaccagcaccagccggtcacgcgggccgagggcgcgcgagcccaccagctcgatcacctggccgttgcccgggccgatgcgctgtacgcggcgcatcaaccaggccagcaggaaaatcaggccgatcaccagcaacaggcctagcaccagttgcgtcaactgcccgctgacgctaccgaccgctggcgccgcagccacctgcgccaccggctccgccgccagggcgctcaatggcagcgccagcaacagtcccgccatcgagtacttcatctcagcgcaacttcttgatgcgttcgctcgggctgatcacgtcggtcaggcggatgccgaacttctcgttgaccaccaccacctcgccatgggcaatcagggtgccgttgaccagcacgtccaacggctcgccggccaggcggtccagctcgatcacagagccctggttgagctgcaacaggttgcggatgttgatttcggtgctgcccacttccatggaaatcgacaccgggatgtcgaggatcacatccaggttcgggccgtcgaggctcaccgggtcgttgttcttcggcacgctgccgaattcttccatggccaggcggttgccagccggcgcggtggcggcgtcggcggccagcagcgcgtcgatgtcgtcctggccaacatcgccggtttcttccagggccgcagcccactcgtcagccagggcctggtcttcggcggaagtgttttcgtgttcggtagccattacatgtcctcggcgcagcaaacaatcatgaattagggttgaatcagcggcggttgatcggctcaaccacttgcagcgccaggttgcccttgtgggaaccgagcttgaccttgaatgacggcacgccgttggcgcgcatgatcagctcttgcggcaagtcgacggggatgatgtccccaggcgccatgtgcaaaatatcccgcaggcgcaactggcggcgggccacggtggcgctcagcggcacgtcgacgtccagcaggtcttcgcgcagggccttgacccagcgttcgtcctggtcgtcgaggtcggactggaaaccggcgtcgagcatttcgcgcaccggctcgatcatcgaatacggcatggtcacgtgcaggtcgccgccaccgccatcgagttcgatgtggaaggtcgacaccacaatggcttcgctggggccgacgatgttggccatggccgggttcacttccgagttgatgtactcgaaattgacttccatgatcgcctgccaggcttccttcaagtcgatgaaggcctgctccagcaccatgcgcaccacgcgcagttcggtgggggtgaattcacgcccttcgatcttggcgtgacggccgtcgccaccgaagaagttgtccaccaacttgaacaccagtttggcgtcgaggataaacagcgcagtgccgcgcaatggcttgatcttgaccaggttgaggctcgtgggcacgtacagcgagtgcacgtattcaccgaacttcatcacctgcacaccgcccacggccacgtccgccgagcggcgcagcatgttgaacatgctgatgcgggtgtagcgggcaaagcgttcgttgatcatctccagggtcggcatgcgtccccgtacgatgcgatcctggctggtcaggtcgtaacttttgacgctgccgggttcggcagccatttcggtctgtaccagaccatcgtccacgccatgcaacagcgcgtcgatttcatcctgggacagcaggtcttgcacggccatgtcgtgatcctactgcaatacgaagttagtgaagagcgcctgctcgaccacgactttgccgagttctttctgggccacttcctgcacgctggcagtgaccttctggcgcagcatttcctggccgactggcgtggccaggctgtcgaagctctgcccggagaacagcatcaccaggttgttgcggatcaccggcatatgcaccttgagggcatcgaggtccgcctggttgcgcgccagcaaggtgatgctcacctgcagatagcgttggcgaccattctggttgtagttggcgacaaaggccggaagcatctgctcgaagattgccggttgcttgacgttggtggcagcttcggcggcgggcgccggtttgctcgcactgctgtgcatgatgtaccaggtgccgcccaccgaggcgccgatggccaggagcaggcccagcacaatcaacaggatcagcttgagcttgcctttgcctgcggggggagttgctgcgtcgtcgctcttcgccatgccaataatccgtcactattcggggattcgtagatctatggcaaggcaagagcaagtgttatgccagagttggctggcaggcgcaggaagatgatcgttcccacgctctgcgtgggaatgcatcctgtgacgctacgcgtcaccgtgcgcaacggtcgaaaacatcgccgacttcgggacgcggagcgtccggggtggcattcccacgcagagcgtgggaacgatcagccagctcccacactgaccgggtttgaacaggaagtcaggcgtagtagtcgaccgcgctggagccaatcacgctctgactcactggcgccgccacttcggccacgtccacagggccaccggcgtcgccgctgtcagcacgcctgccgctgccactgacgccccgcgcctggccctgctgttgctgctggtcctgcccccgcgattggtcggagacattcacatccacctgccccatgccctgctgggcaaacatctcgcgcaaacgccccgactggctctccagcgcttcacgcaccaccgcatggccgctcatgaagttgacctgggcttgctgatccgccgtcatgttgaccttgatatccaggcgccccagctcagcgggctgcaactggatctcggccgacttgaggttggcgctggacaggtacatcacgcggttgaccacctcttcggtccagccgctctggtgcatggccaggggcgcattggtgacgggcggcaaggcattcgcggttttcggtgtggccgcctgggtcagcgcggccaggcggttggcgaagtcgtccacacgggtgtcgctgctggcgttcttgaggtccttgaggccgtcatcgatcagcgcgccgaaggccttgtcaccgccttggtcggtgctgtccttggtggcttgctggtcaaccatgttggccaggccagcggcaaagttctgcgcagcggtcggttggtcctgggtggtgggcgcggctttctgcggcgcctggctgctggccgagacgtgaccgccctgctccatcgccaggcgcacggccggcatcgaatccagcgggtcagcctcggggtcgaaggccggctgcttgggctcctcggtcaccgcgatgagcggcagggcctggtcatcttcggcagcgacggcaggcgcttgtacgggcacagggaccgccaccggcgttacggtggcaaccagcgccgggtcggccaccggttgctgcgccagggacgggtcggccggtggctcgccttcactgtcggcgtggtcgtcgctcttggccggcttggcaggcaagggattgccgctatcggcaaccgctggcgcgctggcggcaggtttatcgctggcttcagccgctttgtcgcgcacgggtttggctggcgcgtcgtcgctcttggcctgcggtttggcagcttgcttggcaaacacttgagcgaagccagcgcccttgtcccgcggggccgcaggcgctaccgcaggcgtggcggccggcgcttgaggcttggccgcggtggcagcctgaaggagcgaatggggggcgactggcataagtaagggtctccactgcatgggggtcggggatgcagtctatggaggtagagcaagagtcgggccaggtttacaaaatgcctggacatatccgattcaatgtaggagcgagtttgctcgcgaaaaactcacaggcgccgcattcatccaggaagtacgcgttatcgttgacgtttttcgcgagcaagctcgctcctacattcatacagtggcttgaccagcgcgaactcatgatcaatctgatcaaccagtgcacttagatccgaggccgcctcgacggcctcggcctccagcaactcacacaattgggccaaacgcaccgcccctagattgccgctgctgcctttgaaactgtgggcaatccgccccaacgttttggcgtcgcctccagccttgcgcagtgctgcgacgcgctcttgcgagtcctcgataaaggtgtcgagcaacgtcgggtactcgctctccattacttcctgcaagtccgacaacacgtcggggtccaaatgaatctcagccacttgctcgctccttgatcaagaatcggcggattatgccagagcctcccaacaaaactccacgcagacactgcgcccgccatcggaccagcctacagcgctgctcagttgacgcaccaggctaagaccccgaccagacagacggtcgatgtccacggggcgggccagctcctgttccacatcaaaaccctgcccgctgtcttcgacgcgcaaggtcaatttgccgcccttgtcggtgggtaccacctgcacatgcacgcgcacgtaaccgctgtccaactgcgccagccgctcatggcgctggcgataatactgcgcaaacccctgggcatcgcgcttgagccgtgagtccaggcccagcacgccatgctccagcgcgttggaatacaactcggccatcacgctgtaaagcgccccactctgctcacgcaggccgtggatctccagcagcagttgcagcaggtacggcagcgggttgtaggttctgagggtctgggcgcgaaattcgaaactcaccgaccaatccagcgggcacgactggccgctgtcagcatacatcggctcggccgcccgcaagggctggcctgcctgcaacgtgatctcgaccatgctgacgtcatcgcgcgcctggccgcgaaaggccgccagggcctgctcgatgtcctcgaacaggcggtcaggctcgcggttggcggcgaacacctgctgcaagcgctcggcgccgaacagttgatcgttggcgtcagcggtgtccagcacaccatcggagagcaaaaacacccggtcgcccaacgccatgggccagacctcggtactgtcatcgaacgcctctgccgacaacacccccaagggcaggtgccgcgacatcaacggcgtgcgcctgccggtggcgacttcatgcacatagccttcgggcatgccgccgttccacacttccaccgcccgccgctgggcgctcaggcacagcaaggtggcgcagcagaacatgtccaccggcaggatgcgcttgagcttggcgttcatttcccgcagggtctgcgtgaggccgtagcccttggcggtcatgccgtagaacacttcggccaggggcatggcgccgatggcggccggcaagccatggccggtgaaatccccgagcagcacgtgcatgtcacccgatggcgtgtaggccgccagcaacaagtcaccgttgaacagcgcataaggcgattgcaggtagcgaatattcggcgcggcgttgatacaaccggaatgggcgaccttgtcgaacaccgccttggccgcccgctgttcatgcatcaggtgttcgtgatgcttggcgatcaggtcacgctgttgcaaaaccgtggcctgcaggcggcgcaggcggtccatggcgttgatcttcgccgccaggatcaaggggttatagggcttgggcaaaaagtcatcgccaccggcgtccaggcactgggccagggcttcgctttcgcgcagcgaggtgaggaagatgatcggcaccagcgcctcccccgccaattgcttgatctgccgcgcggcttcaaagccgtccatcaccggcatcagcgcgtccatcaacaccagttgcgggcgctcacgggcaaacacctcaatcgcttcggcgccattgctgacagtcagcacctgatggccctggcggcggatgatgctcgccagcaacaggcggtcggcggcgctgtcttcggcgatcaggatggtcagcgcttccaggaccggggccagggcgctcaactgatgtcgaacagcttgtcgaagttggagatggcgaggatcttgcgaacgtcggagttgctgttcgtcacgcggacctcggcgtcatcgccgccggcatgatcacgtagcaacagcagcatgccgagggctgaactgtccatgtaggtggcctccttgagatcgacgatatagatctcggggaccttgtagaaacgctcgtaggcctcccgaaacgcctggtggctgccgaaatcgaaccggcccctgattgcgatcgtcaacttcttcccatccagggatacttctgactcgactgtcatgtgactgcttccttgtcgttgcactagacacaaggtgtagcagctgaagagcatctgagcaacacagtgaatcaactgtgggagctggcttgcctgcgatggcggcgtgtcagccacggaatctttaactgaaccaccgctttcgcaggcaagccagcccccacactgggtttgtagtgccgattagaactgttctggtcggggaaggcgttgggacaattcatcgagcagcttttgctcgcgcttgtcttcgatggcgcgcgcttcgtcgatgtagcgctgcaccagtttgcgcagcccctcgacccgggcaaacgcctgttgccaggcctcgcgggctttgtcgaggttggcctcgtgccaggccaggctctggcgttgctgaccaacggcggtttcaagctgattgagaaagccctggtatcccatcagccactggccggacacaccctggctgccgcgctcgatccactgttgctggtactcgccacgaaagcgctccaggtcgcccagcttgctttgggccaaacgcacctggccctggaagtagccaaggcgctgtacggcggctttctcggccttttcggccatgtccaccactggggccaggcgcgcggcgcggctgttggccatggcttagccgcccggcgccggggcgaagatggactgcaagtgcgactggctctcgcccatggtgatcttgtcgttgagaccctggcgcaggtaggtcaccagttgcggctgcaaggcgatggccaggtcggtgtcgcggtcgccaccggccacataggcgccgacgctgatcaggtcacggctttgctggtagcgcgaccacagctgcttgaactgctgggcacgagccatatgctccggcgtgaccaccgccggcatcacccggctgatggacgcttcgatatcgatggctgggtaatgcccctcttccgccaggcgccgcgacagcacgatgtggccgtcgagcacgccccgggccgagtcggcaatcgggtcctgttggtcgtcgccttcagacaacacggtatagaacgcggtgatcgagccaccgccggcttcggcattaccggcacgctccaccagcttgggcaacttggcaaataccgacggcgggtaacctttggtcgcgggcggttcaccgatggccagggcgatctcgcgctgggcctgggcgaaacgcgtgagcgagtccatcagcaacaggacgttcttgcccttgtcgcgaaaatattcggcgatgcgcgtgcagtacatcgccgcgcgcaatcgcatcagcggtgcatcgtctgccggagaagcgacgacaacggaacgcttgagcccttcctcaccgaggctgtgctcgatgaactccttcacttcgcggccccgctcgccgatcagccccaccacgatgatgtcggcctcggtaaagcgcgtcatcatgcccagcaacaccgacttacccacgccggtaccggcgaacaggcccaggcgctggccgcgaccgaccgtcaataaaccgttgatgctgcgaatgcccacgtccagcggcacgctgatggggttgcgtttgagcgggttgatggtggggccgtccatcggcacccagtcttcggccttcatgccgcccttgccgtccagcgcacgaccggcaccatcgagtacgcggcccagcatgctcatgcccatgggcaggcggccagtgtcggccagcggcaccacgcgggcgccaggggcaatgccggcgaggctgccgaccggcatcaggaagatcttgctgcccgaaaagcccatcacctcggcttcgacctgcaccgggtggtagctgtcgtcgttgatcaccaggcagcggctgcccatggcggcgcgcaggccctcggcttcgagggtcaggccgaccatgcgcaacaggcgcccttcgaggatcggctggccgggcaactcggtggcctcggcgtagctgcccaggcgcttggcgaagctggtgcgatcaaggcgcatcggtggcgtccaggtcaacgctcagatccggttcggcggggtgcagggcttgttcatgcagttgatcgaacaacttggccatgatctggctgatgcgggtttccaccgtcgcatcgatgcggctgtgttcggtctcgacgcggcaaccgccgggctgcaacgaagcgtcttcgacgatgcgccaggtttcttcatggcgctcgcgcagggctttgacctgttcgaaatcctgggggttgatgtacagccgcacattgccgacgcccaggggcagcagcttgagggcttcacgcatcaccgcttcgatctggctggagtcgagcaccagttcgcgctggatcacttggcgcgcgatgtgctgcaccaggccgaccatggatttttccagctgtgagtcctgttcggcgatagggtcgaacaggttacccatcaggcgctccaggctacccagcttggtggccagcgccgcctcggcttcctggcgaaccttgagggtggtgctgcgaaagccgtctttttcccccgccgcaaagccttcgttataggcctcctggcggatggtttccaactcttcgagggtcagtggctggacttcatccagcggcacttcttccatttccgccggtggttcctccaccggttcaggctcgggctccggcacatgggggtcgaagctgggcagcgaccagatgtcaaagccgccgacatcccgcgcgcgaatcagatcgctaggcgcctcatctttattcgacatgcaaggcgccttagatcatttcttcgccgcccttcccgccgagaacgatttctccggcttcggccatacggcgggcaatggtgaggatttccttctgggcggtttccacgtcgctgacgcgcaccgggcccttggcttccagatcgtcgcgcaacagctccgaggcgcgcttggacatgttcttgaagatcttttctttgacgttttcgtccgagcccttgagcgccagcaccagcacgtccgaggacacttcgcgcagcagcgcctggatgccacggtcgtcgacatcggccaggttgttgaacacgaacatcaggtcttcgatctggccggacagggtgtcgtcgatctcgcggatcgagtccatcaactggccttccaccgagctgtcgaggaagttcatgatgtcggccgcgcgcttgatgccacccagggtggtgcgcgaggcgttggaattgccggagaactgcttctccagaatggtgttgagttctttgagcgccgccggctgcacggtgttgagcgacgacacgcgcaggatgatgtccaggcgcactttatggtcgaagtggccgagcacttcgccggcctggtccgggtccaggtaggccaccacgatcgcctggatctgtgggtgctcgtagcggatcacgtcggccactgcccgcggttccatccacttgaggctgtccaggccgctggtgttgccacccagcaggatgcggtcgatcaggccgttggccttgtcttcgcccagggccgaggtgagcatcttgcgaatgtagctgtcggagccgacgcccaggctggtctggtcgccgacgatctcgacgaactcgctcatcacctgctcgacttgctcgcggtgcacattgcgcatctgcgccatggccacgccgacacgctggacctctttggggcccatgtggcgcagcacttgggccgcgtcggtttcacccagggacagcagcagcacggcggctttgtcgacccgggacagcttggccacagcggctcgatcattcatctgcgttaatccactctttcacgacctgggccacacggcccgggtcttctgccaccagactcttgattgcgttcaactgagcgtcatagccttcgctcgggcttggcaacaggatgctttgcgggccgccgaggctgacccggtcgttggccagttcgccgtccaggccgcccatgccacccaactcgacgtcgccaccggccagtgccagttgcttcttgccgccaccggtgatgttgttgagcaccgggcgcaatacgccaaacaccagcaccaggataaacaacacgcccagtacttgcttgacgatgtcccagaaccacggctgggtgtagaacgccgggtcagcgatgacttcaccgcgctcggcggagaacggcatgttgatcacgctgacactgtcgccacggctggcgtcgaagccaacggcgtcctgcaccaggcgggtgaaacgggccagttcgtcagccgtccacggcgcacgggtcaccgcgccgtccgctgggttgaccttgacctggtcatcgaccaccaccgacaccgacaggcgattgatcttgccctgttgctgcttggtgtggctgatggaacggtcgagttcgaagttcttggtggactggttacgcttgtccgcagggtacggcgcaagcatcggctggccggtggccgggtccatgatctgctggccgttggcgtccagcaacggctggccaggctggatcgcgccagcggtagcggcggcgccaccggtggtctgcggtgccgaggccggcgcaggcggctggttgctcagagcgcccggcacaccttgggggccattgctggcagtgcgttgttcgctggtggactgctcgctgcgcagggccggttggtcggggttgaactgctcggaagtggactcgacggcgctgaaatccacatcggccgacacttcagccttgtagcggtcgttgcccagtaccggttgcaggatgttatgcacgcgctgggtgagcatgctttccatgcggcggctgtagtcgaattgcttgccggcctgggtcagcgcggagttttcggccatgtcggacagcaggttgcccttctggtccaccacggtgatttgcgacttgctcaattcgggaacactggtggccaccaggttgacgatcgccagtacctgaccaggctccagggagcggccagcaaacaactcgaccaagaccgaggcgctgggcttgcgttcgtcacgcacgaacaccgagcttttcggaatcgccaggtgcacacgggcagccttgacgttattcaggctggaaatggtgcgcgccagttcgccttccagaccacgacgataacgggtggcttccatgaactggctggtgcccaggccctggtctttgtcgaggatttcaaaaccgatattgctgtcggacggcgccacgccagcggcggccagcttcatccgtgcacgggccacatcatcggccttgaccagcaaggcgccggagttgggctccacggtgtaggcgatgtcggcggcggcgagggtttccatgatctgcttggaatccatgcccgacaggctgccgtacagggggcggtaatcgggttgctgcgaccacagcaccacggcaaaaccaatcgccacgctggctgccaggcccaccatcaggcccacctgacgcagcatggtcatttccgagaggttttccaggaacgacaggccaaacaacggcggcttgccgtcggccttggcggggaggttgtcggagactgcttcagccatgacttaaatctcgtccttaaaccggcatctgcatgatgtcttgatacgcctgaaccagcttgttacgcacttgggtcaaggcttggaaggacacgctggccttctgcgaagcgaccatcacatcggtgaggtccacgccgcttttaccgatctcgaaggccgtcgccaactggctggacgcctgctgggtatcgctgactttattgattgcctgaccgagcatgtcggcaaaattgctttggcccaattccggcgctggcgcgacggatttcggttgagccatggcatccatttgcatggcgcgcatatccaacatcaaccgattgaactcaataccctggctcatgaccttctctctccgacgacccgcaattttttgacactacgcagcggttaccaggggtggtagcaacaagggtgccagctctggagcaactcgtaagaaaaggcgacaaagcttgtcgaacttgttaccgcaagttttttgcgcccttcttcccgcacgttttttgtaggagcgagcttgctcgcgaaaaacgtcaacgataacgcgcgcttccagaatgcccgcggcgcctatggattcttcgcgagcaagctcgctcctacacacgggattggcgcgaggtcaggtggcgaaaagataggcttccacgtccatcccggcatcgcgcatctgcgccagcttgtagcgcaaggtgcgcgggctgatgcccaggcgctcggccgcttctttgcggcggccgcgttcggcgcgcagggtgtcgatgatcatctggaattcacggcggcgcaggtcatcgcccagggctccggccgattctgcctcggcgaccacgggagtcggggccaggctcggcagcggcgcagcgccattgcccatggccaggcaaaagtcttgcggctggatcaaaccgccctgctgcaaaatcaacgcacgctggatcgcattgtccagctcgcgcacgttgcccggccatggataactgaccaggcacgcctgggcctcgggtgataaacgcgcctgggcatgcttcatttttttgacgtggttgttcagcaggcgctcggccaaggggatgatatccgccgggcgctcgcgcaatgggcgccaggccagcgggaacaccgacagccggtagaacaggtcttcacgaaagcgccccgccgctacttcgcccgcgaggtcgcggttggtggtggcgaccacgcggatatccagctggatcggcttgcgtgcacccacgcgctctacttcacgctcctgcaatacgcgcagcaacttggcttgtaggcccaggggcatttccgagatttcgtcgagcaggatggtgccgccgtcggcctgttcgaacttgccggcctgggccgcgatggcgccggtgaacgagcccttttcatggccgaacaaggtagcttcgagcatgttgtcggggatcgccgcgcagttgatcgcaatgaacggttgcttggcacggcccgattgctggtggatataccgcgccagcacttctttaccggtgccggactcgccggaaatcagcacggtggaatcactgcgcgctacccgcgctgccagttccagcaattgcgcgctggccggttcaaaggcaatcgggccatcgccgtcggctgcgggcatcacgccgagggcatgccgggccaccagctcgatcaacgccctgggttcgaacggcttgaccaggtaatcggctgcgccttgacgcatggcatccaccgcccgctccaccgcgccatgggcggtcatcagcagcaccggcagttgcggctggcgcacccgcagcaggccgagcaactggtggccgtccatgccgggcatgttgacgtcgctgaccaccaggctgaaggtttcctgttcgaccgcctccaaggcttcctcggcagagccgaccgcacggtagtcatggcccgctagcagcagcgtgtcagccaatgcttcacgcagggcgcgatcgtcttccaccaataaaaccttgatagttttcatcctcttactccgcgcttgccgcactggtaaacagcggcaagctcatcaatgcacaggtgccacgccccacgcgggaacgcagctgcaattgtccctgatgggcacgggccacggccttgaccaccgttaggcccaggccagtgccgttggtcttggtggtaaaaaacggctcgcccagacgttgcagcacctgcggggcgataccgctgccgctgtcgctgacgcacaggcgcagggtttgcccgcgggtgtacaggtgcactttcaggcgcgccccggggccactggcctgggtggcgttttcgatcaggttgagcagcgcgcccaccagggtgtcgcggttgcacagcaattcgccctgatggctgtcgcactgccagcgcaggttggcctcctgcacatggatcgccgctgccgcttgcagggactgcatcaagccggcaggtgtaacgcgatcggtcagcggcagttcgccacgggcaaacaccagcatgtcgcgcacttggtgctccaactcatgcaggcgctccttgaggcgcccggcaaagcgttggtgggtggccgccggtaattgctcgtcagtcaaatggctggcgtagatcaatgccgccgacaacggcgtacgaatctgatgggccaaggaagcgaccatacgccccagggacgacagccgctcatggcgcgccagttgatcttgcaggtgccgggtttctgtcaggtcattgagcagcacaagctggcccggctcggcgtccagggaacgggtggcgatggacagccgacgcccgtccttgagggagacttcgtggccgtcgtcttcacggggggcaaaacagcgggtgatgacttcacgccacagctcgccttccagcggcaggccgagcaggtcgcaggctgccgggttggcttcgcgcacacggccctggtcgtcgatgacaatcacgccaccgggcaataggtcgagcaggttttgcaggcggttggccaggcgctctttctcggccagctcttgcatacgctgggcgctgaccaccgccaattcgcctttaagctcggaaacccgagcctcaagcaggctgtaggagtcggtcagctggctcgacatctggttgaactgcgagaacgcgtgctccaggccctggcgggttggcggttctacaggcgaaaccagcccctggatggcaggggccgaagatagttgggcggcgtggggcatgatgctctctcgcttggctgaccgtcagttaaacggaacgttgcgagggctgtagcaatacccgtgccgaaaaaaatctagctataaatcaagtagttgaaaaacaggcgtcaatcatccgcctgttcatcaccttctttgcggctcataccgtacttgcgcatcttctccaccagggtggtacgacggatgcgcaggcgctcggcggcgcgggccacgatgccatgggcatcgtccagggcctgctggatcaacccttgttccaggttgccgaggtagtccttgaggtccaggccttcgggcggcaacatcgcggtggcgccgaagtccggggtatgcccgttgatcgccacgcgctcttccatgtcgctgcgcaggctgtccatctgctcgtcttcgtcgtcgacgtagcggaatttcttcggcaactcgaccacgccgatcaccccgtacggatgcatgatcgccatgcgctccaccaggttggccagttcgcggacgttgcccggccagccgtggcggcacagggacatgattgccgcggagttgaagcgaatggagccacgcttttcgtgctccatgcgcgagatcagttcgttcatcagcaacgggatgtcttcgacgcgctcgcgcagcggggccatctcgatagggaatacgttgaggcggtagtacagatcttcgcggaagctgccgacctcgatcatgctttcgaggttcttgtgggtggctgcaatgatgcgcacgtccacgctctgggtcttgttgctgcccacgcgctcgaaggtgcgctcctgcaatacgcgcagcagcttgacctgcatcggcaacggcatgtcgccgatttcgtcgaggaacagggtgccgccattggccagctcaaagcgcccggcacggctggtgatcgccccggtaaaggcgcccttctcgtggccgaacaattcgctttccagcagctctgccgggatcgccccgcagttgaccggcacaaagggcccgtcgcggcgcttggagtgatagtgcaggttgcgcgcgaccacttccttgccggtgcctgactcgccgaggatcagcacgctggcgtcggtgtcggccacttgctgcatcatctggcgcacgtgctggatggcacggctggtgccgacgaggctgcgaaacaggttgggttcacggtgacggccgcgctcgcgggcctggtcgtacatctcgcgatagacctgggcgcggtgcagggaatcgagcaatttgctgtagctgggcggcatttccaggttggaaagcacgcggcggcgctggtcttccggcaggtccacggaagaaatatcgcccatcagcaacaccggaaggaactcatcccaggtagacagtgtctttaacaggcccagaactgcgccaggagcgtttaccgtcccgatcaatacgcaaatgacttcacggctcgacgacaacgagctgaccgcctgctgccaatcgtggctgccgcagggtaaattttcttcaccgagaaaatttaaaatcaccgctaaatcgcggcggcggacgctatcgtcatcgatcagcagaattttggtttcacgccacatgcaatagcaacttccctagtaaaacttcctgccccggaatgagggcaatctagacgtctgtaagatttcttaccttctagacgtctgaaatctgaaaacagcactagttaagtcaaaaatgttggcacagtcaaatatatgacgcgccgttcggattaactgcgcccgctcaaccgaacagatggtaaacctttgacgcatttttcgcttggttgatctgcgacatctcttcgaaaatcgcctggcgctcgccggtcgtcacctccagcaactgccgatacaccaccagcaggctttccagcttttcgcgcagtgcatcctcatctaccggcgcctcgctgagcacctcatcaatcaccgctcgacaccccaggtccaactcgccgacagcttcccagttgcgctcggccagcgcgccgatcagggcttcgcgggtttcgtcgatgcgttgcagtgcgtggctcatgatgtgtacctcaaggcgatcggccttattgtggagcgatggcatcccagccggtcttgacggtgatcagcagacgggcgacttcgtcgatcatctcgacatcattgactcggttggcctcgaccaggcgattgcccatgtagttatacaaggcatccagacgctggatcgcggccggatcttcggctttttccggctccaggccatcgcgcaggcccgaaatgatttcgatcgccttgcccagcatcaggcccttttgcgcgatgtccccgcgactcaacgcccccttggcctgggccatgcgatccaggccaccttccatcagcatctgcaccaggcggtgcgggctggcttcggagacctgagcgtgggcattgaccttctggtactggcgaagggctctcatcgggttcatgttgctacctcgttactggcgacaatcgaataggtttgcttaaccagtttttcgaccacggcgataaaaactttaatccagcaccctgcgcgagagcccctggacagggccctggcgcgcaccgctcatcagttcgacttaggattgttcagcgagttgagggtggtcaggatgctggagctgctggcgttgatctgcgcaatcatggtgtccatcgccgtgtacttggcggtcagggacttctgcaaggcatccatgcgccgcgtgaggtcatcggtctctttggtcaagtcggtcaacttgttgttgagatcggtggcccgggtcgccagggtgccggtggtgccgacatagctgttggtcgccttgttcatgcgggtgatcaagcccgagtcgccggtgaacagcttggcaatgtcgccagcgcccttgaccacggccttgtcccaggttttgtcatccaggctcagcaggccggttttctggtcggtggtaatgcccatctgcgccaggctggtcatggtgcccgcgccggagccgttgaccaattcggaacgcaggctgttcaccaattgacgcatcgacgcatcgcctgtcaacgcacctgcggtagtggtggaagcatcaccggtggcagtgaccttggtttggctattgatcgccgtcatcagcgtgttgtaggcgctgacgaaggactgcaccgaggttttcagcgtgtcggtgttgctggccacggtgatggtggtcggcttggtgatgtctaccgtgtccaacaggtccagggtcacgccgctgatcgccgaggtgatcttgttgctggtcgatgacatttcaatgccatcaatggagtacttggcgttggtcggcggcgtgcctttgtcgtacccggtagccagttgcgaatcaccgctgagggtgatgtcggtgccttcacccatattggtcgaggtgagtaccagccgtgcgccattggagtcactcagtacgttggcactgatgccttgggacgagagctgggtattgatcgactcgcgcacctgttgcaaggtcgcgccaccagggatcaccacgtcgtagcttttgcccgactggttgatggtcagcgtctggtcttcgtcggtgctgttggccttgcccgacgcgccctccgcgttcaccgccgtggtgactttcgaggcggtcgcaaggttggcgatcttcaacaggtacttgccgctggatgcaccgtcagtcagggtgaccttggcgtttttctcttccgaagaagtcgccgccagcccgttgaaggccgaggcattgttcaacttggtgatcgccgcctggtaggcttccaacgccgtcttgaccgagcccacggcagacaactgcacggtggctttcttctgctcgttggtgatctgagcctgcttgggtgcctgctcggccccgaccagcgccttgacgattgcttgggtgtcgtagcccgaacctgggccggaaatcgttgaactagccatttgccattctccttgtcctgcagcggccgttttttggcgcttatacgcctagaccgcaatcagaaacatgtttcgtgccaactcaagccttgctatcaaacaacaggctgccggcatcgctcaggttctgcgccaatttcagcgcggtctccgatggtatctgtcgaatcacttcaccactgtcagtggcgatcaccttgaccactaccttgccggtagagtcatcgatggaaaaatccaggttgcgctgtgaagcctgcacaaactcacgcatatcggtaacagccttttccagcgcaacgcgctgaggctcttcacttttgatcggctcattgctggccacaggcttggcctgggtcaccactgcgccaaggttggccggggccggggctgcggggtaagacgaggtcagcttgatgctcatgtccatgtcaccacctccaaactgaaaaaacggaagggcacgttgttaaacgcaccctcccgttatttaaccgctagcgctattactgaagcagcttcagaacagacgatggcagttggttggcctgggacaggatcgcagtggaagcctgttgcagggtttgttgcttggtcagctcagcggcttcagaagcgaagtcagcatcttctacgcggcctttggcagcggaggagttctgcgaaatgctctgcaggttggccacggtgctggcgaagcggttttgtacggcacccagctgcgaacgctggctgtcgatctgctgcatggcgtcgtccagagcctggatggcctgctgcgaagaagcggcagtcaggatgttcaggtcggaaacgctggtttccatggtgacggcggttttggtgccggccgctgcaacagcggtcagacccagtgcagccaggccagtaccggcgctaccatccttgatggtgatgtctttgtcagcgaacaagttcagggtgccgtcagcgtttttgctggcttgaacaccggtgctggcgctgttgatcgaagaaacgatcgcgtcagcggtgtcacctttcttgaacttgacttcaacgccgttcacgtcaatggaggtgtcagcggtcagtttggcttgggaggtgcccgcggacagacccagttgcgacagcgaacccgcagaggtgttggacagcttgatgtcctggccaccaccggaggtcactttgacacgaccatcaaccaaggtagcggttgcaccagtacccgcagcagcagcgatgtcagtcagcacgtcagccattgtatcagtggcagtccaggcgacagcagtgccgttaaccgagataccgccagtcacacccattgcggtggtgccggtaggggtgctgttggtagctggagtagcacctgcagtcagaccgagtttagcaaggccaggtgttgcgccgccggtagcggaagcgcccagggtaatagcacttttcgaggtcagagtaacgacaccggcagcatcagcgcttgcagtaacaccagtggtagctgtttgagcgttgatagcagtaacggcagcagtaccggctgctgcaccagcagcggcaacacccagagtaatttcagtaccgttaatagtgaacgcgtcagttgcaacagttgccagtgctgcggcaccaccgactgccgtggccttagtaccgcccaacacggagccagtcgaagtagctgccagaccagacatcgcagtgccgtttacagcagcttctttgtagttacccttcagcgcagtcgagctgatgtcggtcataccgaacgagatagtctcgttggcgttggcgccgatctggaacgctacgttgctgaacgagccgtcgagcaggttacgaccaccgaaggtggtggtgctggcgatacggttcagttcgcccactttagcggtgaattcttgctgcagggaaacacggtcagcgtcgcttttatcaccgttggccgcttgcagggcgagttcacgcagacgctgcagggtgttggtggattcttgcatcgcgccttcagcggtctgggcaatcgacacgccgttgttggcgttggcgatggcaacgttcaggcctttgacctggttgttcagacggttagcgatctgcatgccggcagcgtcgtctttggcgctgttgattttcaggccggaggacagacggttcatcgactggctcagagcgtcggaagctttgttcaggttcttctggacacccagggaggtgatgttggtgtttactgataatgccatgacgaaatcctcgtggtttggatactgcggcttccggccctggcgaccgccgggtgtggcctagagaacctacgtaatagttatcgtcgtggtagccggttgcttgaggatttttttgattttttttagtagccctgtgccagcccttgtatttcaagggcttatagaggcgtgaaacgcccgtaatcacgggttactggcgccaaaacttcgccttcaagacatccccccttgtaggagcgcgcttgctcgcgaagaacctgagaacgccgcgtgcattctgaatgcccgcgttatcgttaacgttcttcgcgagcaagctcgctcctacagggggggcgcaaaaaaaacgccgatgatcgtgggatcatcggcgttttttgtgcagcggctaaagcatcacggacgatagagaatcgccgagccccacgacaggcccacgccaaagccgctgattgccacgcgcttccaggtggcgtccatcacgtgcttttccagcagcagcgggatgctcgacgacacggtgttaccggtctcgaccatgtccttgatgaacttgtccaccggcgcttcttcaaagcggcgcgccacggcgtcgacgatggccgcgctgccctgatggatgcagaacgcgtcgatatcatcagccttgaggtccgactctttgagcagctcgtgcaagtgcgctggcaccttgagcaaggcgaagttgaacacctggcggccgttcatgaagaacacaccatcgctgaccttcaggtgcggtgcgccggaaccgtcggtaccgaacttggatttgcccagcagccatggcgcgtcctcgcccatccaggtggcggtggcggcatcaccgaacagcatggtggtgttgcggtcttccgggtcgacgattttggaatacgggtcggcggtgatcagcaggccgtttttcaggccggcggcttccatgaagcccttcatcgcgtagatgccgtagacgtagccggagcagcccagggagatatcgaaggcggccacgtgagtcggcaggcccagtttgtcctggacgatagcggcggtgtggggcaagccctcttcatcgccgttctgggtgacgacgatcagcgcgtcgatggactcgcgcttcaaatccgggttattggcgaacaatgcgttgacggcttcgacgcacaggtcggacgtttcctgtgcagcttccttgcgcggcagaaacgccgaaccgatcttgccgatgatgaactcttcatccttggcgaatttggcaccctgggcgtagttatcgatcccgtctgccggcacgtaactggcgatgctttttatgccaatcattgtggcttcccaatactaaatagctggagaacacccctcgggctacgccgggagtgctgacaataaaggggataaccccatgaaaatctcgctgaaagccgcccgatgaaggccctgtgacgacttatccttttcacacgatacagtgaagatgcgctttatgactcacaggtcactcaattttgcgtggtttatgcaaaacgtttcaacaatttagccccagaaacgataacggcccgccctgtttccagagcgggccgcttgactgaacgccgtttacatcttgttgaacaggctcaactgcgagattttcacgaaggccagttgcgaagcctgcaacatggtttgctgcaagctcaggttgacggcggcttcggcgaagtcgacattgcccagggcattcatggtggtggtattggccaggtccaggctgacgttttccttggactgaatatccaggccattgaggcgcgcgcccagtgagccgcgtgcctggtcgatctgcccgtaggcattggtcaagttgccaatcgacttggctaccacatccttgagctccttctgcgccgccggattgccgtctgacggcgtttccagaattttgcgcagatggctgagggtgtcgaggacgttctcgttcttgttgctggtggcactgatcgcaaactggtcgccggctgccggcgccggtgcggtggtgacatcaaaggtcacccctgccgccgtgatggtggttgcgccggccgccagggtgccactggcgatggatttgctgtctgcgctatacggctgcgcatacaggtcataggcgccagcggccccgaacttcacgatcacgcccgaattgggaaaggtgctggcgtaagccgccggatcgctcaccgtgccgccgctcagttgcgcggttgacggattgctcggggtgcgcgaaacgctgaaggtgtctggtttgaccgacaggctgaattcgcggtccttgacgatggcgtccgacggcgcgcctggcagtatgtctttgcccagcgcgtctttgcccaggttcaagccaatgtcgaacttgaccccgcgcaggctgatagtcgaaccgccttccttggtagcgtcgaaagtgccgttgcccggaatctccgaggtgatgtccttgccggcattgtccgtgacgacgtattgggtgctgctggtgaaggtcagcttatacggctgaccatcggaaaaactgctgttatagctgctgttggccgcgatcagcccggcagatacggtgaccttgccatcgtcgactgctggcggcacgaggattggcgcggtttgcgtacggcccgtattcgccgagctttcaagcatgctcttggcggtattgcccatggcaaccgacaggttctctgcgatcttcaagctcagcggcgtgtcatcgccctggtagctgtaggtgccgtcattgttgcgggcgtagggcggcgtatcggtcttgctgccggagaacaagtaattgccgctggcgtccttggtattgagcaggcccaggacctggtcttcaatggcgccaatctcggcggccgtcgacttgcggtcagcgtcgctgatgccgacgttacccgccttgagcgccaactcactggcccgttgaatcgcgatattgatattttccagcacgccgtcctgggtggtcagcgagtttttcagggtgtcgatgttgccattgaactgcgccagcatgtctttctgctgctgcagcatcaacaaccgcgccgccgccaccggatcatccgcggcggtctgcacgcgcacaccggagctggcctggtcctgggccttgaccacgctggaatagttgctctggtacttggcagagctggtctcaaaatactgctgtgtagaaatacgcatcgtcccagcctcccttaaagagcattcatcagtgtggtgaaggtttcctgcgcagccttgatgatctgcgacgacgcggtgtagtactgctggaacttgatcatgtcgcccgcttcatcatccaggttgaccccggataccgagttgcgtgcttccttgttggcgctgagcaacgcgccggtggcggcggtgtcgaccccggcctggctggccttggcccccacggtcgagaccagcttgctgttggcacccaccaggctggtgcccgcgttgccatcgcccatgccgacagtggccttggtttgcaggttcagcagttcctgggcattgcggccgtcggacttgccgccactgttgaaggcaaaggtggtgctgtcgccgtctgccggcgagccgttgacggtggtgtcgaacttgaagctcttgccgggaatggcggcaccgctggcgtcgcgcatcggcacgtccacggtgatcttgttgccctgccccggaatgatcgagccagtgccaatcgggttgcccttggaatcgttgatggtataggactgcgtgccgtcggcggcgggcttgccgaacaccatcttcaccggcatcgagttttcaataccagcgcgcagctgcgcggtgtcggtgccgccatggatatccagaggcaccgtcaaggccggctgggtaaaggtgcccgtgccgctgttggtcgtgctgctggtacctgccaacgggccggcgaacgccagtttgttcgcatcggtgagcgccacgccaataccgctggcgcccgtggcggtggggctgactttgaaactgtcgccaaacgccatggtgcccttgccgtccagcgccagggtgaagccatccagggtcggcggcggtgttgagctcatgtcgaaggtgcccatggccttgccgtccgaacgcaacaccgtgatcttgttaggatcggtcttgtcgctgaaggtcacggtgtagtcaaacgtggacaactgactgctgtccttgatcgtcacgttcaggttgcccgcgccggcgctgttgcccgaggcaccctggctgcgcgaggcaatggcggcggcgctgttgatgtctttgaacagcgaaacgccaaagtcaccgttgaggtccaggccctggcccagttggttgttgagcgtgtctgccgtggcgatggcgatacggcccagctcattgatggccggcatcagggcatcgctgcgatagcgcaacaggccgccgatgctgccgccgctgatcaccgagcccaggtccagggtggtgccgttcatgtccagctggatggtgtactggctgttatcggttttgcttggcgcggcggaaatcttgttggagatcccgccctccaccagggactggccgctgccggtggtcacgctgaactggccgtttttctcggtggccgtcacgccaatcaactcattgagcgaacgtactgcctcgttacgcgagtccagcaggttggccggggcgctgttggagctgccttgggcctgggagatctgctggttgagggaggcaatcgaggcggtcaattggttgacctggtcactcatgctgctcagttggttgttgatcgtctctttctgctgagtcaactgcgtggagatcgcgttgaaacggctgctcagggtctgggcgttggtcaccagcagttggcgggccgacaggtcgctggggttggacgcggcggtttgcagggtggcgaagaacgaactgagcaccgaggacaggccggtggttttgtccgacagcactttgtcgacggcccccacctggtccaggtacgccttggcgtcgttattgagcgccgtgctgttctggtaagcggtgtccaggtactcgttgtacacccggcgcacatcggccagggtggtgccgctgccgatgtacacgccgccgaacgggttcgacgcgttggtattttgcgtggtctgctgacgcgagtaccccggggtattcacgttggcgatgttattactcaagaccgacaacgatccttgagcggcattgagccctgacatcccgatactgagcaaactcatggttcagaccttataaatgtgtggttgcgccagcggcagcgtagttctggtaactgttcatgttttttgcgatctgcgaaatcttgctggcgtaatccgggtcggttgcataaccggctttttgcaactcgcgtacaaactgttccgggttgtcggctgatttcacaacttctttatagcgatcatggctttgcagcagggtcacgaggtcgtggaagctgtcctgataggagctgtaggaacggaactgcgccgtttccttgaccatcgcaccatcgcgaaactcgctggtgatcgcccgggcctgaccgccctgccagctctggccggccttgatgccgaacaggttgtggctgctgctgccgtcctcggcgcgcatcaccgatttgccccagccggtttccagtgcggcctgggccaccaggtacttggggtcgataccgatacgtgcggcggcggccttggccatcggcagcatggtggcgacaaactcatcctgggagctgaaggctttcttcgctggcgccagcggtggctgggcaatggcgcggccatacacttgcatgcgcccgctcggcacggcaaagctacgcgcgctgctgttaatgaccgtgtcgtcggcagcgctgttacgcaggggcgcggctttggcttcgaccggagcgttcggcacgatgcccgccagcaggcggtcggccagcctgctgggcaaggcgatacggcgctggttcatcagttccatgtcgttggcatgggtgctggcgccctcaggcacggccacgcgatacgcccacaaaggccgctggccattggagcggcccaacgggccttcggcctgggtaccggcggcaatctcggtcggcacatcgactttcttcaccggcgcatccgccgccgggccttgcaaggtggcggcctgggcctccaccggcttgttcttctgcatctggcgcatcagcacatcggccaggccgataccaccgccttcgcgggacatcgacaccgccaattgctggtcgtacatttcctggtattgcttggcggccggggtgttcagcgggttgtccttgcccagggcctcggtggccgaacgcatggacttgagcatctcgttcaaaaacagtgactcgaattcctgcgccactttgcgcaggttgccttcactgtttttgtcgtcgccgaccttgagctggttaagccggttcaggtcggagtaagaccccgagtccgccgtgctgctgataccgctcttgcgcatatccatggccatggcctcagatcacgatcaggtcggcttgcaacgcgccggcctgcttcaaagcttcgaggatcgccatcaagtcgccgggcgcagcgcccacctggttcaccgcacggacaatctcgtccagggtggtgccggggccgaacttgaacatcggcttggcttcttgctgggcattgacgcgcgagcgcgggaccacggccgtctggccaccggacaacggcccaggctggctgacgatcgggtcttcggtgatggtcaccgtcaggctgccgtgggttaccgccgctggcgagaccttgacgttctggccgatcacgatggtgccggtgcgcgagttgatgatgactttggccacggcctggccggggtcgacctcaaggttttccaggatcgacaggtagtccacacgctggcttgggtccaaaggcgcagtgacgcgaaccgagccgccgtcgatggcctgggccacgccagggccgagcatgtcattgatcttgtcgaccacgcgcttggcggtggtgaagtcggagcggttgaggttcagggtcaggctgttgccctggttgaaaccactcggcacggtgcgttcaaccgtggcgccaccggggatacgaccggccgacggcacgttgacggtgatcttcgaaccgtcgcggccttcggcgtcaaaaccgccgaccaccaggttgccctgggcgatggcgtagacgttgccgtcgatacctttgagcggcgtcatcagcaaggtgccgccgcgcaggctcttggagttacccatggacgacacggtgatatccaccacctgccccggcttggcgaacgcgggcagatcggcgctgattgacaccgctgcgacgttcttcaactgcacgttgcccgagcctggcggcactttgatgccgaactgcgagagcatgttgttgaaggtttgcagggtgaacggcgtctgggtggtctggtcacccgtgccgttaagccccacgactaggccatagccgatcaactggttggagcgcacgccggaaatactggcgatgtccttcaagcgctcggcctgggccacagcgctcaaggccaacaaaagcgccatcgccatcagctgtttgaacttcaaaatggccacctagaaagggaacagcgggctgaggaagaagcggtcgaaccagcccggctggctcgcatcggcaaacgaaccggtgcccgagtaggtaatgcgcgcatcggcaatgcgcgtcgacggcacggtgttgtcggtggagatgtcatcggcgcggaccatgccggcgatgcgcaccagctcgtcgccggtgttgagggtcatccacttttcaccgcgcacggcaatgatgccgttgggcaatacgtcggcgacggtcacggtgatcgaaccggtcaggctgttgccctgccctgccgcgctcttgccgttggtggcgcggtcgccgctgtagccggcgtccaggctcaggtcaccactgcccagcgggttgttggtgttcaggccgccgccgaacaacgaggtcaggccgatgctggtcttgctgttcttgccgatctgcgagttggcgttcttgctggcctgggtcttctcattcagggtaatggtgatgatgtcaccgacccggaacgccttgcggtcgctgtacaggttctgctcgaaaccagcctggtagatcgagccattgttggccgccgccggcagcggcgtgcgtggcaacaccggcgcgtagtacgggtcattgggctttggcgagggggcgacacagcccgcaagcacggcgatcccactcaatgccaacacacaaacatagcgattcatgaccctaacctcacggtgttgcaggcaccctcaagggcgccccatagactgattacagattctgcgtgacgaacgaaagcatctggtcggcggtggaaatcaccttggagttcatctcgtaggcgcgctgggtggtgatcatgttgaccatctcctcaacggtgctgacgttggaggtttccagggtgctttgcagcgtggtgccgaagccgttcaagccaggggtgccgatttgcggcgcgccactggaggcggtttccaggaacaggttgttgcccatcgcctgcaggccggccgggttgatgaagtcggcggtttgcaggttgccgatcacttgggaggccgggttgcccgcgacggtgatggacacggtgccgtcgttgccgacggtgaaggtcttggcgtcgggcggcaccacgacagcaggctccagggcgaaaccgttggcggtcacgatctggccgttggagtccaggtggaaggtgccgtcacgggtgtaagaggtggtgccatccggttgcagcacctggaaaaagccgcggccattgatcgccatgtccaggggctggccggtttgctgcaggttaccggcgctgaagtttttctgggtgccgacgatctgcacaccggtacccagttgcaggcccgacggcaattcgctgtcctgggtcgattgggcgccaggctgcttcttgatctggtagagcaagtcctggaactcggcgcggtcacgtttgaagcccgtggtcgacacgtttgccaggttgttggaaatggtcgtcaggttggtgtcctgggcggacaggcctgtcttggcaacccatagagccggaagcatgctgttctccttcgtgcgccggatggttggcgctgcgttgcaaattaattagtgggcttgaatcagctcatctgcatgacgcgcgtcatggcctggtcgtcttctttagcgctgttcatcatcttgatgtgcagctcgaactgcttggccagcgccagcaccgcggtcatttcttccacggcattgacgttgcttgcctgcaggaaacccgaggtcagccgcacgttcgcgtcggcctgggccggctggccatccttggtgtggatggtgccgtccaggcctttggtcatgttcttgaggtcaggctggaccatcttgatacggtccacttccgccatcacccgcgggccttcgcccatggcacggatgctgatggtgccgtccgaacccacttcgattttctgctggggcggcacggcaatcgggccaccgttgcccatgattggcataccgttgccggcacgcagcacgcccagggcatccacgttcatgctggcgctgcgcacgtaggcttcgccgccatccggggtttgcacggccatccagccgtcaccgctgacggccacgtcgaggtcgcggccggtttcgatcatcgcgcccggtgaaaagtcggtagccggacgttcggtcatggcaaacgcccgcgccggaaagctgtcaccgaacactggcatcgaacgcgcctgttccaggtcgcgctgaaagccgttggtggaaatgttcgccagattgttggcatgggccttctgcgccagtgcattctggctggcgccggtcattgccacataaaggtacttgtccacgctctatcctctttctgacggacgcttgccgcccaccgctgtactgaggaggcttaagcaatttgcgaaccaacttttcaaaagaggccaaagtccaggcgcggcgggggtttcgtggaggtatctgaaataggcaagggagaaacagtcgaaaaaacggcggactactgccgccagcggcaaacaccggcctgaaaaacgacagagctcaaatgtgggagcgggcttgcctgcgatagcggcggaacaggcactgatatgccaactgacagtcccctatcgcagcatagatatctacacaaccttgtgggctgtagcagcaaacggtaaccacgatgcgaagcgagtcgctcttgatctgcttttgatcttgatctcaggcgccccgttaaaccacgctggccgaaattcgacagggatttggggggtaaaccggcagggatgccggcggattacgggcacaccgagcctaagcgaggtgccgagtggtggggcaagagccttttgcttnnnnnnnnnnnnnnnnnnnnnnnnnnnnnnnnnnnnnnnngtggccgttacctaaataacggatatgtacccggtccaactgtgttgactgttaggccgtcatcgcaggcaagccagctcccaccgttttaactgcgatcagccttgagcacttcgtaatcgcgcagtttgttggcaatggtggtgtgcgacacccccaggcgcttgcccaactggcgactgctggggtgttcggcatacaggctttccaacaccgccttctcaaagcgcccgacgatatcctccaggctgccctccagggaaaaatcacccagcggctggcgcacgccatagtccggcagacgaatatgctcaaccttgaccgtaccgccctcacacaacgacaccgcctggaacagcacgttttccagttgccgcacgttgcccggccagtggtagtggctgagtttgtccatggccgcaggggccagcttgggcagtgggcaaccgatctgccgactggcctggtcgagaaagtgctcgaccaacggcgcgaggccatccaggcattcgcgcaacggcgggatatgcagcgacagcacattcagccggtgataaaggtcctgacgaaactcaccccgggcgcagagttccgacaagtccacctgggtcgcgcagatcacccgcacgtccaggtacacctcttcatcactgcccacccggcgaaaacaaccgtcctgcagaaagcgcagcagcttgacctgcaagcgcgcgctcatttcccccacgccatcgagaaacaaggtaccgcccgccgtcagctcaagcaggcccaatttaccttccgcccgcgccccttcaaatgcgccggggccatagccaaacagttcagtctcggccatcgactcgggcaaccccgcgcagttgagcgccatcaacggcgactgcccccgcgggctggccaagtggcaggcccgggccaacagctccttgccggtgccggtttcgccttctattaatagcggcgcatccagcggcgccatgcgccgtgcttcgcgcaccactgcggccatgaccttggagctttggaagatgctgtcgaaaccgcgcagctcttgcttgcgcacgttatagatacgctcaccgacacggtcggcgcggtgcagggtgagcacggcgccggccatggcttcgctgtcatcgtgctcggaggattgcaggggcgcgatgtccgccagaaatacgtcacccttgaccttgacccgcaggccattgattcgcgatttgctggcgcgcaccagttccggcaggtcgaagtcctcggcataccgcgacaggggaatcccgggcacctcatctacccgtacgccaagcaactgcgccgccgcacggttggcggccacgatggagccgcccatatcaatggacagcactggaaattccagggcgccgagcaacgcattgagttccatatgccgacgctcgctgggcatcagccctacccgcttgacgccaaacaccccggcaatcgcctcgaactgcggtcgcaacgcctggaactgcatgttcacaaggttagggcagaacaggtagatggcgttgccatgctcaccgccgacttcgcccttggcgacgttgacgccgtactccaccagcaggttgaggatgtcccgcaggatgccgatgcggttctggcagtgcactttgatacgcatggaaagactcgaaaagggagtaggcgccgcgtctttttgtcgctgggcgcagatagtcgtcaagattatgtgacagtacggcagccattcccagcccatagctgtgacaagtcggactatcgtaacgaatactttacgattctcggtgatttttcctacatgcgtccattaaaggctgatggaatcctgcgcctatccggttatcaatagaggcatcccaggacataacaagaacgaatgcctagcaggagagccgtatgaagcagacgcactacgtggcccgcgagcccgatgcgcaaggttttatccactacccgccagaagaacatgcggtgtggaacaccctgatcactcgccaattgaaagtgatcgagggccgcgcctgccaggaatacttggacggcatcgacaagctcggcctgcccctggaccgcattccccaactgggcgagatcaacaaggtgctggccgacaccaccggctggcaagtcgcccgcgtgccggcgctgatccccttccagaccttttttgaattactggccagcaagcagtttccggtggcgacttttattcgcacccgtgaagaactggactacctgcaagagccggatattttccacgagatctttggccactgcccgctgctgaccaacccctggttcgctgaattcacccacacttacggcaagctcggcctggcggccaccaaggagcaacgggtgtacctggcgcgcctgtactggatgaccatcgagttcggcctggtggacacgccccagggccggcgtatctacggtggcggcatcctgtcgtcgcctaaagaaagtgtgtattgcctgtcggacgagcctgagcaccaggcctttgatccgctggaagcgatgcgcaccccctatcgcatcgacatcctgcaaccgctgtacttcgtcttgcccgaactcaagcgcctgttcgacgtggcgcaggaagacatcatgggcatggtcgagcgcggtatgcagctgggtctgcacgcaccgaaattcccacccaagcccaaagccgcgtgaacctcacgttttaaggccaggtgagtctgttccctggccccgcgttgctttagggtaacgccactgaccttcaatcattcgaattcaggacaccttccatgaccaccttgaaccaagcccactgcgaagcctgccgcgccgatgccccgcaagtcagcgatgaagaactgccggtactgatcaagcagatccctgactggaacatcgaagtgcgcgacggcgtgatgcagttggaaaaggttttcctgttcaagaacttcaaattcgccctggccttcaccaacgccatgggtgaaatctccgaagccgaaggccatcacccaggcctgctcaccgagtggggcaaagtcaccgtgacctggtggagccactccatcaagggcctgcaccgtaacgacttcatcatggccgcgcgcaccgacgaagtggccaagaccgccgagggccgcaagtaatgcatttcgatgccattggtcgcgtgcccggcgacccgatcctcgggctgatggacctgtatgcccaggatgccaacccgaacaagttcgacctgggcgtaggtgtctataaggacgaccaaggcctgacgccgattcctcactcggtgaagctggcggaacagcgcctggtcgagacccaagtgaccaagacctatatcggtggccatggcgatgcagccttcggcagcctgatcagcgaactggtgctcggcgccgactcggccttgctgcgtgaccgccgcgctggcgccacgcaaacccccggcggcaccggcgccctgcgcctgagtgccgactttatcgcccacagcctgccgggccgtggcgtgtggctgagcaacccgacctggccgatacacgaaaccatttttgccaaggccgggctcaaggtcagtcattacccttacgtgggcagcgacaaccgcctggacctgacggcgatgctggcgaccctgtccagcgtgcccaagggcgacgtggtattactgcacgcgtgctgccataacccgaccggctttgacctgtcccaggatgactggcgccaggtcttgcagatcgtgcgtgaacgccagttgctgccgctgatcgacttcgcctaccagggctttggcgatggcctggagcaggacgcctgggcggtgcgcctgtttgccgccgagctgccggaagtgctgattaccagttcgtgctcgaagaacttcggcctgtatcgcgaccgcgtgggtgcattgatcgtctgtgcggcggatgctgaaaagctcactgatgtacgcagccaactggcgaatatcgctcgcaacctatggtcgacgccgccggatcatggcgccgccgtggtggcgaccatcctcggtgatgcacagctgaaaaagcagtggagcgaggaagtcgaggccatgcgttcgcggatcgcccagttgcgttccgggttggtggaagcgcttgcgccccatgggctggccgagcgctttgcgcatatcggcgcgcagcgtgggatgttttcctataccggcttgagtgccgagcaggtcaagcaactgcgcgagaagcacagtgtgtatatggtcagttcggggcgggctaacgtggccggtgttgatgcaacgcgcttgacgttgctggctcaagccatcgccgacgtttccaactgaagcaacaggattacgtgtgggagctggcttgcctgcgatggcggtggttcagttgcagattaattgcctggcccaccgccatcgcgggcaagcccgctcccacaggggattgatgccggacgctgaatccgtgtgcgatacctagccagcgcccacttttataagcacgcagggcttcagccagcgaccatttcggcctttagcagtgcctctttggcctgcgcatccgccaaccgatacaactcgatatgcccatcccagtgctcgatcaaggccgtgcacgactccacccaatccccgcagttgaggtaatccacctcgcccaccttgcgaatctcggcatggtgaatatgcccgcacactaccccgtgcaattcacgcttggtcacttcgtgggcaatcgcctcttcgaaatcgctgataaaactcactgccgtcttgaccttgtgtttcaggtacgccgacagcgaccaataaccgtagccataccgcgcacgccagtggttcagccagcggttcagcgtcagggtgaattcgtaggccgagtcgccgaggaaggcgagccagcggtgatagcgcgtgatcacatcaaactggtcgccatgaatcaccagcaagtggcgaccatcggcggtgacgtgcacggcttcatcgaccaactggatattgcccaggatcagcttggaatagcgacgcaggaactcgtcatggttgccggtgacatagatgacctcggtgccacgcttggccatggtcagcaggcgccgaattacgttggtatgggcttgaggccaatacatgccaccgcgcagtttccaaccgtcgatgatgtcaccgaccaggtagaccttgtcggcatggtagcccttgagaaagtgcgacaggtgttcggcctggcaatcccgagtgcccaggtgcacgtcggaaatccacagggttcgcacccgttgcttgcggctgggcttggtgaactcggcacgggtcatgggcatccctcgacgctgttttggcgagcttgcgccttggcgattaatagtccatgacaagcgtgcgtcagtctgatgacagcgcccgcggcccgccaagcgttgtagactgacggcttgccgccctggagaccgcgatgagcccgaccctcacgctacgccactacctcgaagcgcccattgcccacagccatgaccatgcgcagttggtgttcggcctttccgggcacctggacctggaagtcgatggccgtggcagccaggtgcgcgaaagcagcgtgatggtgctgcccttctccacccaccacgcctgcatcagccgcgatggcagccgctgcctggtgctggatgtgccgaccgagcactgggtggtgcaatccttgggcgaacatgccgatgccagccgccgcttgctcgaccaacccgcacgcctagcgctggatgcccggcaacaccaactggtgcagtggctggcacaaagcccggtgcacgacccgctgatcgtccagcaaggcgccgtgttgttactggccagcctcaaccaccctcagggtcaaccgctgcctggccggcgtctgccttatgccgcgttcaatagccatatcgagcgccatgcggcgcgtccgctccaggtggccgacctggcgcggattgccgatttgtccgtgccgcgcctgcatgcacggtttatggctgagtgcgggcaaacgccgatggactatctacgcagtcgtcgcttgcatatggcgctcaggcttttacgcgaaacctccctgcccatcggcgagattgccgagcgcgtcggctacgcctcgcaaagtgcattttgcgcggccatgctacgggcctttggcgcctcgcccggggcgttgcgtcgggcgggctagcaagagtcttgcgctaaaaatcacccggcccgcgacagacgcccatcctccaaccctctagactgcgaggctgtcaccccctgttggatcaaggatcgcaatgactccccgctcagcccttggcgccctgcatatcggcgcactgatgtttggcctcaccggcgtattcggcaagctggcggcggcctcccctgccatcatcgtattcggccgggccgcgtttgccgtgctggccctggcggtattcgcccgctttgccagcaacgctccctggaaaaaactggagatgcgtgactggcgtcgcctgctggtcagcggcgtcgtgctggccgcccattgggtgacgttctttatcgctgtcaaagtcgcgggtgtggccgtggcgaccctggggttcaccgcatttccggcctttaccgtaatccttgaggggctgattttccgcgagcgcattcgcgccaatgaagtgctgctggtggtgctggtcaccgttggcctggtgcttgtgaccccggatttcaatctcgccagcgaggccacgggcgggctgctgtggggcatcgcttcgggcctgttgttctcgttgttgtcgctgaacaatcgcgccagttcagggcgcattcctgcggtacaggccgcgctgtgccagaacgtcgtggtcgccgcgctcctgctgcccgtggccgcgccggggctggcagatgtgcgagggatagattggctgtggatcgggctgctgggggtgttttgtaccggcttggcccacagcctgtttgttgccagccttgcggtgatcaaggcgcgcaccgcgtcggtggtgtttgcgatggaaccggtctacggcatcaccgtggcctggctgttgtttgccgaaaccccgaccctgcgcatgctgctgggcggcgccttgatcatcgtcgccatcgtgctttcgggcgtgatgggcagcgccagccaggccaagcaaccggcgccggcctgatttcagacgctacggtcgttatgcccgaggtcgcgctgcgggtcgatctggtcgcgcactcgctgcttgagcaccttggcctcgggaaaaccgccatcggccttgcgctcccaaatctgcacgccatcacaggtgatgcgaaacgcgccgccagtggccggttccagcgccacgcgccccaggtcatcggcaaaggtgctgagcaactcctgagccagccacgcggcgcgcagcaaccactggcactgggtgcaataggtgataacgatctcgggtttgcatgcagacatcattaagcggctcctggcgtaacaggctcagcgaatcgggtggctataatagcggcctttgccgcccagccacgagattgatgatgcgccgcctgctgtcttgcctgttcctgtgccttgtccccctacttgccgacgctgtagaagccccccgcccgaaaatcggcctggtactgtccggcggtgccgcccgtggcctggcgcacatcggcgtgctcaaggcgcttgaggagcaaggtattcatatcgatgcgattgccggcaccagcatgggcgcggtgattggcgggttgtacgcgtcgggctacaagatcgacgagttggagaagttggcgctgggtatcgactggcagcaggccctgtccgacgcgccaccgcgtgaagacgtaccgtttcggcgcaaacaggatgaccgggatttcctggtcaaacaaaaactcagtttccgcgacgacggcagcctcggcctgccgctgggtgtgatccagggccagaacctggcactgttgctggaaagcatgttcgcccacagcagcaacacgcgtaacttcgacaagctgccgattccctttcgcgccgtggctaccgacatcaccaccggcgaaaaagtagtcttcagcaaaggccacctgccccaggtgatacgcgccagcatgtcgatccccgcggtgttcgccccggtagagttggatggccgcctgctggtggacggcggcatgaccgacaatatcccgctggacgtggcgcgggagatgggcgtcgatatcgctatcgtggtcgacatcggcaccccgctgcgctcgcgcaaacaattggccaccgtggtggacgtgctcaaccagtccatcaccctgatgacccggcgcaactccgaggagcaactcaaggccctgtaccccaaggacgtgttgatccaaccgccgctggccgcttatggcgtcaccgacttcggccgcgccaaagacatgatcgacgccggctaccgcgccacccgtgccctcgacgtacgcctggcacacctgcgccctgccgaacccatcgacgccgacctgatagctgcgcgcacgccgggcgaacgcaccccggtgatcaccgcaatccaggtggagaacgactccaaggtcagcgacgacgttatccgctactacatccgccaggggctgggagaaccgctgaacctgggccgcctgcaatcggacatgggcaccctgtacggcctggattacttcgagcaggtgcaataccgcgtggtaaaaaaaggccaggacaacaccctggtgatcagtgcacgcggcaagcgcagcggcaccgactacctgcgcctgggcttgaacctctcggacgacatgcgcggcgacagcgcgttcaacctcggcgccagttaccgcgtgaacggcatcaaccgcctcggcgcggaatggctcacacgggtgcagattggtgatcggcaggaactctacagcgagttctaccaacccatggacaccggctcacgctactttgtggccccctacatcagggccgaggcacagaacgtcgagctgatcctggacaacgaccccatctccgaataccgcctggaacgctacggctttggtttgaacgtgggccggcagatcggcaacagcggcgagatccgctttggcgtgggcgaagcctggggcaaggcggacgtgcgcattggcgaccgcgacctgccgagcgtgagcttcagcgaaggcttctatgaactcaaatactccttcgactccctggacaacgtgtacttcccccacagcggcgaagacatcggcctggcctttcgcgagttcgaacccggcctgggctcggaccagcgctaccgccagtgggaattcaagctggacaaggccatgagccacggcccggacaccctgatactgggcggccgctatgggcgcactctggatgattcggatgtggtgatttccagcttcctgctcgggggcgcacggcaattgtcgggcttccgccaagatgcgatttcagggcagaacatcagcctgatgcgcgcagtgtacttccgcaggctcaccccgcgctcgtacctgccactggacttcccgttgtacctgggtgcatccctggaacggggccgggcgtggaacaacgataacgagttcgacagcggctatatcaatgccgcgagtattttcctggggtttgatacacccttggggccgctgaatttcagctatgggttcaatgatgataatcagaaggcggtgtacttgaacctgggccagacgttctaggaaaggattgccaaggacttttgtaggagcgagcttgctcgcgaaaaatccacagacgccgcgtttattcagaaagcccgcattatcgtgacgtttttcgcgagcaagctcgctcctacatactgcagttcaggacttttccaggttcgccaggatgtgctcatgcacccgcatgcacacccgcaggtcttcctcattcacacccacgaacaactcatggcgcaacgccgtggcgatggtttcgatctggtcgatcagcggttgggcggtatcgcacagcaggatgcgtttggcacgacggtcttccaccacggcttggcgttgcaccaggccctggccttccaggctatcgagcagacgggccagggtgggcccttccacgccgacactttgggccaattcacgctgggtgggtgcttcgacaaaacgagccaggtgcaacagcacgagccagcgcgcctgggacaagcccagccccgccagccggcgatccagttcggcgcgccaacctcgggacatttgcgccaactgcatgccaaaacggtgttgatcggttaacggcataaaaaactcatgtttaagactgaaaataaagtatggctaattattagtcagctaagcatgagccctgcccgtaggcaaggcccgctatgtactgattcgttacattgtcgtaattggcacactaaatttcgaattcggactgcaaagcggcacgcacgcagtacaaaacgccttccggaacacgcccggtaaataacggcgcaatctccgtgacagctggcaattcgccttctccatcgagaaaagcgtcctggatttcaccgagcaaatcctcaggcaaatcaagggcctgctccagggacaattgctgcttgccgatggcttcggcgagcaaggtgtacacgtttttttccgagcattgcagctggccggcgatctggatcggggtcatgccggcacgggccaggctgatcagttcgtggcgaatatcggcgatttccttcggcgcttcggcctggccgccgagcacttccaggaaggcctggccgtagcgctccagtttgcgcgcgcccacaccgctgacccgggccatctcggccatggtggtgggctgctcgcgcagcatctccagcaaggtggagtcggggaagataacgtaggggggcacgctgtgctcctgcgccagtttgcgccgcagggtgcgcaaggcttcccattgttcgcgctcctcgccccgcaccaattggctggcctggctggcgctgctgcttttggcggtggtctgcggcttgaggtcgcggcgcagttccaggctcacttcgcccttgagcaacggccggcaactgtcattcaggcgtagcccgccgtagccttcgatatcgatgtcgaccagaccacgggcaaccatctggcgaaacagcgaacgccactcaccttcggcgcgagctttacccacaccgtacaccgagagtttctcgtggccgaagctgcggattttttcgttgtccttgcccagcagcacgtccaccaggtggcccacgccataacgctggccggtgcgatagattgtcgacaatgcctggcgcgccggttcggtggcatcccaggtttgcacgccatcgatgcagttatcgcagtggccgcagggctcaggcatgtcttcgtcgaaatacgccagcagggtctggcggcggcagcgggtctcttcgcataacgagagcatggcgtcgagcttatgttgctccaggcgcttgtggcgctcgtcgccctcggagttctgcagcatctgcttgagcatcaccacgtcttgcaggccgtagaccatccaggcatccgccggcaggccatcgcggccagcacgcccggtctcctggtaataggcctcgagggacttgggcaggtccatgtgcgccacgaaacgcacgttggatttgtcgatgcccatgccaaaggcaatggtcgccaccatgatcaggccttcctcgttgaggaagcgtttttggtgcgcagaccgcgtttcattgggcaggccggcgtggtaaggcagcgccgggtaaccttgctcacagaggaacgcggcgacttcgtcgactttcttgcgcgacaggcagtacacgatgcccgcatcactgcgccgctcggacaggaacgccagcaactgcttgcgcggctgctccttgggcacgatgcggtagaaaatattgggccggtcgaaactcgacaggaagcgctcggcgttctgcaaatgcaggcgctcgacgatctcttcgcgggtacgcttgtcggcggtggcggtcagcgcaatgcgcggcacatcgggaaacagttcggccaattggccaagctgcaggtattcgcggcggaaatcgtggccccattgcgacacacagtgggcttcgtcgatggcaaacagggcgatctcaaggctctgcaaaaaggccagcatgcgtggctgcaccaggcgctccggcgccaggtaaagcattttcacctcgccacgcttgatgcgagcagccaggtcgcgctgctgctcggcgctgagggtggagttcaacgacgcggcggcgaccccgagttcttcaagggtggctacctgatcgtccatcagcgcaatcagcggcgacaccaccacggccaggccgttgcgcaacagcgccggcacctggaagcacagcgacttgccgccaccggtaggcatcagtaccagggcatcgccgccactggccacgcgctcaatgatcgcaccctggcggccacgaaaactgtcgtagccgaagatgtccttgaggacgcgttgagcctgctcgagcatgtaaaactccaaaatggtgccgaaatccctctatacaggctggccgaaaaaaaccgcgctcacgaaaaataatccgtaagcgaagttttcccggattggcgctgggcctgcaggggcatcacaaaacgcggcagtatacccgagcgttctccaccaaagggcgccactgacgaatagacgcaccaggctaaaaccgggcaaatatgccgtgcggctggcctgggcgctcaagaaagcctagaattcagcatcgtttattcccaaggtagcccttcaatgtccttcgctgagcaactaacccgcctgcaagccttcctcgacgccgatgagctgcatgacgaggcgctggactacgtggccgcccacggctacctgaccgccctgtcgatctgctccgaccccgtcccggaccgtgaatggatcgatgcgctgttcgctgaagagcctcactacagcgacgacgcccagcgcgcagaaatcgaatccaccctggtcgccctcaaggcgcacatcgcccgccaactggcctccgacgaagagttcgagctgccgtgcgagctggacctgggcgacgatccggatgactccgacctgcgcggctggtgcatcggtttcatggaaggcgtgttcctgcgcgaagccgcctggttcgaaaccgccgaagaagaagtcagcgaaatgctgctgccgatcatggtcggttcgggcctgttcgaagaggaagcagagttctccgacatcgccgccgacgccaacctgatggacgacatgatcgtgcagatcccggaagccctgaccgcgctgtacctgctgtgcaacgcgcctgacgaaaaaccggcgatcctcaagccacgtcaccactgagtcgcttgcccgtggcacccatgggcaaccgtccactgctcctgcgctacgcgctgctggccatcggctggctaagcgtagcgttgggagtgatcggcattttcctgccggtattgccgaccacacccttcctgctactcgccgccgcctgtttcgctcgcagctccccgcgcttctaccactggctggtggaacacccgcgcctggggccctgggtgcgcgactacctggacggcaatggcatcccgctcaaaggcaaggtctacgccattggcttgatgtggttgagcatctcgatttcctgctacctggtgccgctgccatgggcacggggctttatgctgaccagtgcagtgctggtgacgatctacatcctgcgccagaaaaccctgccgccacgctgaacgccgcctgcgacattcgatcccacacgaccttggtcgacactgactaacaccgggcatcatgcgagactgtccaaccgggcctggaatgcccgggtgttcttatgctcggagttaccatgacgctgtccagcgggctgatcgccgccgttgccctggcctatatggccactatgtttgccatcgccttttacggtgaccgccgccatgcgccgctgccgccgcgcgtgcgtgcctgggtgtatagcctgtcgctggcggtgtactgcaccagttggaccttcttcggcgccgtaggccaagccgccgaacaactgtgggcattcttgccgatctacctgggccccgtgctgttgctggtgctggcaccctgggtgctgcagaagatgatcctgatcagcaagcaggaaaacatcacctccatcgccgactttatcgccgcccgctacggcaagtcccagtccctggcggtggtggtggcactgatttgcctggtgggcgtgctgccctatatcgcgctgcagctcaaaggcattgtgctgggcgtgaacctgctgatcggcgccggccccgacaccaccggcacccgcgcccaggacacggccttgatcgtgtcgctggtgctggcgctgtttaccatcgtgttcggcacacgcaacctcgacgccactgaacaccaccgcggcatggtgctggcgattgcctttgagtcgctggtcaagctgttcgcttttctggccgtgggtgcgtttgtcacctacggcttgtacgacggtttcggcgacctgttcagccaggccatgctcgccccgcgcctggaggaatactggaaagagaccatcaactggccatcgatggtggtgcagaccggcgtcgccatgatggcgatcatttgcctgccgcgacaatttcatgtgacggtggtggagaacatcgacccccaggatttgcgcctggccaagtgggtgttcccagcctatttgatcctcgcggcactgtttgtggtgcccatcgccctgggcggcaagatgctgttgccaagctcagtgctgccggactcctatgtgatcagcctgcctatggccgaggcgcacccggccctcgcggtgctggcgttcattggcggtgcgtcggcggccaccggcatggtgatcgtggcaagcatcgccttgtcgaccatggtctccaacgacatgctgctgccctggctgttgcggcgttccagcgccgaacggccattcgaagtgttccgccactggatgctgtcggtgcgccgggtgagcattgtgatcatcctgctgctggcgtacgtgagctatcgcctgctgggctccaccgccagcctggcgaccatcggccagatcgcctttgccgccgtgacccaactggccccggcgatgctcggcgcactctattggaagcaggccaaccggcgtggggtgtttgccggtttggccgccggtaccttcctgtggttctacaccttggtcttgccagtgacggcgaaaagtctgggctggtcgctcaaccttttccccggcctgacctggatgcattcccacccgttcgggctgtcggtcacgtcgctgaccttgggcaccgtgttctccctcgcggggaatttcaccctcttcgtgtgggtgtcgatgctgtcgcgcacacgggtttccgagcactggcaggcaggccgttttatcggccaggaaatcagccagcgtgcgagtgcgcgctccatgctgtcggtgcagatcagcgacctgctcagcctcgcggcacgcttcgtcggggaagaacgggcccagcagagctttattcgcttcgcctaccgacaaggcaaaggcttcaaccccaaccagaatgccgataacgattggatcgcccacaccgaacgcttgctggccggcgtactcggggcctcctcgacgcgggcggtggtgaaagcggcaatcgaagggcgggaaatgcagctggaggacgtggtccgtatcgccgacgaagcctcggaagtgctgcagttcaaccgcgccctgctgcagggcgccatcgagaacatcacccagggcatcagcgtggtggaccagtcgctcaagctggtggcctggaaccggcgttacctggaactgttcaactacccggacggcttgatcagcgtgggccggccaattgcagacatcattcgctacaacgccgagcgcggcctgtgtggccctggcgaagcgcaagtgcacgtggcgcgtcgcctgcactggatgcgccaggggcgtgcgcacacctccgagcgcctgttccccaatggtcgagtgatcgagttgatcggcaacccgatgcccggcggcgggtttgtcatgagcttcaccgacatcaccgcgttccgcgaagccgaacaagcgctgaccgaagccaacgagggccttgagcagcgagtgaccgagcgcacccatgaactgtcgcaactgaacgtggccctcaccgacgccaagggcgtggccgaatccgccagccagtcgaagacgcggttcctggcggccgtgagccatgacctgatgcagccgctgaacgctgcgcgactgttttccgccgccctctcccaccaggccgatggcctgtccggcgaggcacggcagttggtgcagcatctggacagctcactgcgctcggctgaagacttgatcagtgatttgctggatatttcgcgcctggaaaacggcaagatcaatccacaacgccagccctttgtccttaacgagttgttcgacaccctgggcgcagaattcaaggcgttggcccaggagcaacacttgcgctttcgctggcgcggcagccgtttgcgagtggacagcgacatcaagctgctgcggcggattttgcagaactttctgaccaatgccttccgttatgccgacggcccggtactgctaggcgtacgtcgccgcaagggcgaactctgcctggaggtctgggaccgcggccctggcattgcgccggataaacaaaaggtgatcttcgaagagttcaagcgcctggacagccaccagacccgtgccgaaaaaggcctgggcctgggcctggcgattgccgacggcctgtgccgcgtgctgggccatcgcctgagcgtgcgctcctggccgggcaacggcagcgtcttcagcgtgtgcgtgccgctggcccgcaaccaggccagcgcgcagcccaaggcgccggcagaaaccggcctgcccttgagtggcgcacgggtgctgtgcgtggataacgaagacagcatcctgatcggcatgcgcagcctgctcacgcgctggggctgtgaagtctggacagccgccaaccaggccgaatgcgcggcgttgctggccgacggtatacgcccgcaactggcgttggtggattaccacctggaccacggcgaaaccggcaccgagttgatgggctggctgcgtgcgcaattggccgagccgattcccggtgtggtgatcagtgccgatgggcgaccggagatggtggccgaggtgcatggggcggggttggattacttggccaaaccggtgaagccggcggcgttgcgggcgctattgagcaggcatttgcccctgtaacggggctgtattcgatcgctattgtaggagcgagcgtgctcgcgaaaaactcaaaggcgccgcgctcattcagcaagcacgcgttatcgttgacgtttttcgcgagcaagaactaggcgtccccctcgctcctacagaaggcgatgaccgcttaactgactggcattagagcaagcccgctcccacaatttcgatccgtgtttattccgggagatgcgccacgccgtccgaatcggtcattgcccgctccagcagatctgccggcaagctcttactggcgcgggccccgagcaaccttaattgctcggtacggctgaccaggttcccacgcccatccgtcagcttgttgcgcgccgcgctgtaggccttgtccaactgttgcagccggttgcccacttcgtccaggtcctggataaacagcacgaacttgtcatacagccaaccggcacgctcggcaatttcccgcgcgttctggctctggcgctcctgcttccacaagctgtcgatcacgcgcagggtggcgagcaaggtcgtggggctgacgattacgatatggcggtcgaaggcttcctggaacagcttgggctcggcctgcaatgccgcagaaaaggcagcctcgatcggtacgaacagcagcacgaaatccaggctgtgcaaaccttcaaggcgcttgtaatccttgccggccaagcctttgacatgattgcgcagggacagcacgtgttgcttcaaggcggcctggccaatcacctcgtcatccgccgcaacgtactgttgataggcggtcaagctgaccttggagtcgaccaccacctgcttgtcgcccggcaacatgatcagcacatcgggctggaaacgctcgccatccgggcctttgaggctgacctgggtctggtactcacgacccttctccaggcccgcatgctccagcacccgttcaagaatcagctcaccccagttgccctgggttttctggcccttgagggcacgggtcaggttggtggcttcgtccgacaggcgcaggttcaattgctgcaggcgctcaagctctttggccagggaaaagcgctcacgggcttcgttctgatagctttcttcgacacgtttctcgaaggactggatacgctccttgagcgggtccagcagttgaccgaggcgttcctggctggtttcggcaaagcgttgctcacgctcgtcgaagatcttgccggccaactcggcaaattgcgcacgcagttcgtctcgtgagccttgcaggtcggtgaggcgttgctgatgactctcttgctgctcgcgcaattcggcgctcagggccgcggccaaggcgtcgaggcgacgcagttcggcttccttggcgctacgatcgaggttccaggcgtgcgcggcatcgcgggcgttatcgcggtcgatctgcaacagctcgacttcacggcgcagcgccgccaagtcggcttgcttggcagcattggcctggctcaggtcactgatctcatcgcggctggcgtccagttgagcggcgagcccttcctgggccagttgtgcggtcgccaggcgctcctccagcagctcccagccggtggtgcgtgcggtcaggcgccgctggagttgccagcacagcgccagtagcggcacggctgcgcccacaagacccaaggcgatactggtccagtcaaacaccatagccatttctgccatcaccgaaaaagatcaagggtaaccaagcctaaggccggaggacagctcagtcttcgacctggcccagttcgcgctgggcgcgacggtcgccggcgcgagcagccgaacgcaacaaatcgtggccgatgcgccggtcacgggcatttccgcactcgcggcacatcagttggccaagacggctctgagcggccaccacgccttcgcgggcgggctgcttgagcaagcgtccggcaagatgcttgatattggtgctctgcccaaggcgcgggctgtcgagcagccacaaagcgaccttcaaggaaaaacgcttgggtgcggtaacagtttggggcgtgtcggtaacagaatgtgatactgagcgaaacttcataaagcactgtggggcagaacggaaggcgcgccactctactctttttttcgcacaggtaaagctgaaaaaaccgtgcacgcccgtcctagagcaagcgctcgggacaatccacagaagctgtggataactcagtggacaacccccctggaacaggcgcaaagccccatggaacgggggccgcagtcaaactgacgattttttcaccaataaaaaaaagcgagatttttcattgacttaaattttgattacaggcaaatgggcgcacttgcacaccagtgacagcagggttacacccttggccttgaatgtgcacaagtccttatcggctggttatatcgtcggcgttttttgattcaacaccggttaaacatgttactgagcaggcaaacccaagggcttttcaaatctgcctcggttcgccacactgcgccaccgacaatgcaaaccagtagggccgatgaaaggaattctgttattcgccgggctgctactggccatctgcgcgatctccctgggaatcaatgccgcgctcccctctccggacggcgcactgttcgccattgctatcttgctgtcagccgcctttaccgccgtgatcctgtgcatcgaactcagtgacggaaggatcaatgacatgcgcgaggtgatccgcatgatcgagaccggccagtccttgcggctgacgctcgccgcctacgggctggggtgcgcactggccgcgtccatgaccgtgctggtctatcacgagttgctcggcggctgatcgaagtttttttgcaatcggccttcccttccctgtttcaatccgttactatccgcggcgttagtaccaagctgaaagtcaattctggtcgaacacgtcccctgaaccacatgggatcgaccacctcgatggtttccaggtattccttgcgacgacactgcctttgaacaagcaaagggtggcgcgaagttccaatactctgaccgaaccaacctgcaaattgatcaggatcttcaccccgggcccagaacctttgcccctgttgtgttgcctgccctcctaagtacctacctgccagcccaagcgcgccaaatttaatagcgcttcaaactggctgctttgttccagtcgggttcttcgtttgatcaatggtgatcagcgttactggaacgttttaacgttgcacggttcttatccgtgtcatttgtaggaacaccaataatatgaacgctcaaatccacactcaggatgccattcgcaccctcaccaacgcttttgccccaatgaactgcctgatcatggccgctcgcaaaggctgtttcagcttcaccctggtcaacgaacacggcatcgctcgtcacagcgaacgcctgtaccccgatcaatactccagcgcagaaccgctgcaggccgtgatcgatcgtacccgtcaggcactgactgcctgatcgacccgcgtcgctgaaacctcaaaaaaccctgtttgaataacagggttttttattgcctggaatttggccctgagttcgccgggctaagtacaaatggatataaacgttataaccagttgcagaagatgttttaaaaacagtcctttacatcgtgaatatgacactacacttcaactcaagcggcgtgatccgcttacgacgggcctgagatccgattcaccgctgccaagccccccttctcaggctcgtccactctttgcaaggactgaggctcgtatgggtattgccgccagtgaattgtgtcgttatgtgatcaggccgacgctgatgtacctcggccgccacagctcgacagccgaatccctgctgctgggcattgccgccagccagtcagaactgggctcggcgctgcatgaccgccgcggccacggcctctacagcatcaccgaaccacgccaccgcgcgctctgggataactacctggcgctggacccggaacgcgccagcctggtgcgtgggctggccagccaacatgcgttcctcagcgcgccccagttggagttgacggtaaatctgcgctacgccacggcgatcgcctggctgttggtggaacaacatcgtcccgccctgcccgcgcccggcgatgtactggccatggcgcgtatctggaaagaaatattccacccccagggccgcctgcgagatttcacccacgcctggcaaacctgtgtaatcccaatgaaacaggcagcttgctgaccgggcaaattgcaagattcggcaaaaaacggcaattttggtcggattgtcctacaaaaccgctctatctccagcattacagcctatagcgcgatctgaaatttattgatactttccgcagcggtgatcacacggagttctaataatgaaaaaagtaatgctcaagaccacacttagcctcgccgttgccatggcatcctcccaactgttcgccagcggctttgcgctcaacgaacagagcgtgagcgggatgggtaccggtttcgcaggtcgctcttcttctgccgatgatgcgagcactgtgttcggtaaccctgccggtatggcacgtctggaaggccaacagatcactggtggcgttgcagccattgatgcctctaccgatatcagcaatgtcagcggccgctccgctggtagcaacaaaggcgatatggtgcctttcaccgccgtgcctttcggtttctacaccaataaactcaacgaccagtgggctgtcggcttcggcgtctatgcgccgttcggcctggtgaccgactacgaaagcggcttccagggccgtggctttggcagcaagagcgaagtgaaagtcatcactttgcaaccgaccgtcagctacgccttcaacgatcgcgtttccgtaggtttcggcccgaccatcaaccgcattgccggcaccctggaatcggacctgacgctgaaccctcgcgcgccagacaccaatatcaagatcaagggtgacgacaccgcactgggcttcaacatcggcgtgctggttcaagccaccgataccacccgtgtcggcctgacctaccactccaaggtcagctacaagctggacggccacaccgaagtcaccgcaccgaccgcgacctcgccgttcctgcgtagcaaccgctacgacgcctcgctgaaaatcgacacccctgagtcctacgacctgtccgttactcaagacctgacagacgcatggaaactctacgccggtgcgacctggacgcgctggagccgcctgaaagacatcacggtcaagaacgaaggcgtcagcggcgctaccggcggcgcgcttgccccaggccttgtcagcacaatcaaggaagaccagaactggcacgacacctgggcctacgccgtgggtacttcgtaccagctcaccaagcaagtggtactgcgtaccggcttgacgttcgaccagtcgccgaccaacaacacggatcgctcgccgcgcatcccgactggcgaccgtactatcttcagcctgggcctgggctaccaggtcatggataacatgaccatcgacctggcctactcctacctgaaggaagaggacgtcaagatttcgcgctccaaccaattggccagctacaacgccaagtatgaaaacagcgccaacggtttcggcttgggcatgacctacaagttctaacccgcagccgtataaaaaagccccgctctcctgtgaaggaggcggggcttttgtttggctggcggtcagggtttggaagccaatgcctgttccaccgccttgatcagctccggactgtccggcttggtcaggctggaaaaactggccacaacattgccctggcgatccactacatacttgtagaagttccacttcggcgccgcgtcggcctgctgtgcaagcaccttgaacaggtgcaccgcatccggccccttgaccttctgcggctcggtcatggtgaaggtcacgccatagttcacgtagcagaccttggcggtttcctcaccggtcttggcttcctgcttgaagtcatcggacggcacgccaatcacttccaggccttggcccttatagcgctgatataaggcttccagtcctttgaactgcggagcgaaaccgcagaaactcgccgtattgacgatcaccaaaggtttgccagcgaattgctggcacaggtcgatggattccttggcccgcagcttgggcaattggccctccagcaacggcgggcaactggcggccatcgccacgctgccaatagccatcaggacgggtacagcgagccagcgcatctgcatgtcaaaagtccttgagtcggttcagacccacaacttaacagatcgccatgcccagttgcatcaacgccaggccgccccgctgccagccccaccaggccagcaacagcaacaccatccccaccgccaacagcataagacgcgctgtcatgctcatgccgcctccatctgcgcctgtatacgtgccaccggccgctcacgcaccggccaattcagcgcggcggcgagcaggctgagcaaaattgccacctgccagatcaaatcgtagctgccggttcgatcatagaccaccccgcccagccatccgccgaggaacgagccaagctggtggaacaagaacacaatcccgccgagcatcgagaggttgcgcacaccaaacagggtcgcgacggtcccgttggtcagcggcaccgtggacaaccacaaaaagcccatcgccatgccgaacagatacgctgtgacttcagtgaccggcgcccacaggaacaacacaatcaccaccgcccttaacaggtacaagccggtgagcaggcgcggcttggacatgcgcccaccaagccaacctgccgtataggtgccgaacacattaaacaggccaatcaacgccagcacggtggtgcccaccgtggccggcaggtgctggtcgaccaggtaagccggcaagtgcacaccgatgaacaccacttggaaaccgcagacaaaaaagccgaaggacagcaaccagaagccggagtgagaacaggcctctttgagcgcctcacccagggtttgctggcccaccgtgaccgccagcggccggtccttgagcatggcgaccagcggcaggatcagcgccaccatcaagcccagcgccagcaacgctgccgaccagccgagccagccaatcaagccgagggtaccgggcaccatggcgaactgaccaaacgagcccgccgcgctggcaatacccatggccatgctgcgtttttcgggcgctacggcgcggccgaccacgccgaggatcaccgagaacgaggtgccggacaggccaatgccaatcagcaaacctgcgctcaacgacaatgaccacgcggagtcagacatgcccatcagcaccaggccgacggcgtacaacaccccgccgacaaacaccgccttggtcgcgccgaaacggtcggccaaggccccggtaaatggctgcgccaagccccagatcaggttctgcaaggcgatggcaaaggcaaaggtttcacgcccccaaccgaattcgctgctcatcggcgccaggaacaggccaaagccatgccgtacgcccaaggataacgccaggatcagcgcactgcctaaaaggacccaaccactggtgcgccacatcgagctcatttcttattctccgttcgcgggtatatacccgcttgtagtcgaacaaaccgccgttcaggcgagttcatccagcaaggccaacaacatttcgcgcttttcggcgccaagcttatcaatcagtttctgttgcgctgcttcccacgccggcaacgcagcggccagcctttcatgaccggcgtcagtcaacaccaccaggcggttgcgcaaatcgtcgccctccaccaattgcactagcccctcaccttccaggacacgcaggttgcgccccagggtgctgcgatccaggcccatggcgtccgccaggctggaaatgctcggctggtcgagacgctgcaggttgcacaacagagaatactgggcaacgttgatcccgaagccgtcgagagcgccgtcgtagtgcctgctgacgccacgggcggcgcgtcgcaggttggtgcataaacattgggaggcaagcatagagcgtgtatatacccggagttaaccaattgcaagaaagcgttacaacgccagcccgaccagcaccgcgacttcaagcagctccagcagtgcgccagcggtgtcgcccgtggtgccgcccagacgcttgaccatcaactggcgcagccacacgaaacacaatgccgccagcaacaccgcgatgccgccgttgaaaccgccgatcaggatacaggccaagccgctgaggatcagcatctgttggccgacaattcgcggcagatggtctgacagtgcctggcccaatccgcccgcccgcacatagcgcgtggtgagaaacagcgccagcatcgaagcgcgtccgatcaggggcgccaggatcaaggcggtgccattgtgttgttcgatcaacgccaccaaggcgctgaacttgagcagcagcaccaagcccagggtgaccaccgcaatcgggccactgcgcgggtctttcatgatgctgagggtgcgttcgcggtcgccaaagccacccagccaggcatcggcgctgtcggcgaggccgtccaggtgcaagccaccgctgagcaacacccaggccgtgagcagcaacgcggcgtgcaacagcaatggggcgcccagcaacacctggttgaggccccataacaacacaccgaacagcagcccaaccagcggataaaacagcaacgaacgaccgagctcttgaggctgcggcatgcccggcaagcgaatgggcagactgctgagaaattgcagggcgatccagaacggcagcatcatcagcgtccttccttcaacacgccatcggcttcaaccagcaggccgaacaaggcgccgtgacccacttcgacgttcagcagttgctcacggggcaaccctcgcgcctgggccagcagcaggcgcattacaccaccatgactgatcaacagcacgcgctggccagcataggcctgacgcagccgggcgacagcgccaagcacgcgctcggaaaaccggatgaccggctcgccttccggcggagtgaaggcatagggattggcccagaacaagcccagcccttgggcatcggtgtccatcaacgcggccgcgctctgcccttcccaggcgccgaagtgcagctcctgcaagtcaggctccaggctcaccggcacatcgagctgtgcccccaactcctgggcaaacagggcgcagcgttgcaggggtgagctgatcagccgatcccatggcccctgccccaccactgcgtcgcgcatctgctgccagccgttggcggtcagcgcatcgtccaggctgccacgcaggccgccgcccagttcggtttcgccgtggcgcagcaggtccaggcgcaaggtcatgcggggcgatccgccacggcggcctcggcgaacgtcgccatctgcccgtgcagcgcacacgccaggcgcaacaagggcaccgccaacgcggcgccgctgccttcgcccaggcgcaggcccagttccagcaacggctgcgcatcgaggctgtgcagcacatggcgatggcccggctcggcgccgcgatggccgaacactagccattcgcggcacgccgggttcaagcgcaccgctaccagcgcggccacgctgcagatgaacccatccaccagcaccacgatgccttcctgggcgcaggccaggtaggcgccgaccagcgcggctatttcaaaaccgccgagattgaacagggtttgcagcgcatcgctgcgctggccggcgtgcaacgccaaggcccgttcaatgaccgcgaccttgtggctgacccctgcagcgttcaaaccggtgccagggcctgtgaggtcagtgacctggcaatccagcaatgcgcaagccaaggcactggccgcggtggtgttgccgatgcccatctcgccgccgataaacaactgcgcaccgctttgcagggcgcggcgtgcgctgtctcgcccggcgttcagggccagttgcccttgggcctgggtcatcgccgggccatggacgaaattggccgtgcccgcgccgatattcaggtgacgaacgccgggcaaatccaaggacggcgtgacggtgccgaggtcgaccacttccaattgcgcttgcagttgccgcgccagcacgctgattgccgcaccaccggtgacgaagttttgcagcatctggccagtgaccgcctggggaaatgccgatacaccttcagcgaccacaccgtgatcgccagcaaaaatcgcgatccacaggtgttctaccgagggcttggcctggccttgcaaacctgccagctgcaccgccagcgcttccaactggccgagggagccggcgggtttggtcaactgctgctgacgcgccagcgcctgttcgtgggccgtggcatcaatggtcttgcaggggttgagccaccaggaatcggtcataacgcagtacctttcaaagtcaggggcaggccggcaaccgtcagcacaacgcgctgacattgctcggccagggcttgatgcagccaaccggcttcatccacatagcggcgagtcaattcgcccagcggcacgacacccagaccggtctcgttgctgacaaaaatgatttcccccggcagcgaggccagggtttgcagcaggtgatcacgctcggatgcaaggcgcgccgggtcttcgagcatcagcaggttggtgagccataaggtcaggcaatccaccagcaggcagcgatcagtggcggcgttttcacgcagcacgcgcgccaggtcgatgggttcttcaaccaggccccaatggtcgggccgacgctggcggtgcagcgcgacgcgctcgttcatctcaccgtcgagaggttggctggtggcgatataaatgacggcaagcccgctctgtgcggcaagcttttcggccaggcggctcttgcccgaacgggcgccgccgaggatcaattgatgcatgcaaagacccctggtaaaccatgtggaagcgggcttgctcgcgaatagggtgtgtcagtgaatgcagccatggctgacccaacgcattcgcgagcaagcctgctcccacagttagattgtggtgcgtcaggtggacatgaggcggccgccagggcgctatcgcaggcaagccagctcccacgatggggtcgtgtaaacatcttcagatcccacatagcttgcgtaataaatcggtatccaggtgatgctccaccaagtccgccaagcgctcgatatcgcgctcgcgcaggccgtgataattcacctcttgtacgtcctgcaacccggcccaacgcagcaaggcgctgcacgctgccggggtctcgaataagccgtgcaggtaggtgcctagaatttgcccatcggggctctgcgcgccatcgctgcggccatcatccagcagcaccgcagcattggataaggcagcaccggcagttacccccgcatggatctcataaccgctgacttcagcatcttccaacaccagacgcccacgcacattgcgcagttgtttctcttgttcaagggtggtgctgaatgccagcaacccaaggccggcactggagccagcgagcccttccaggcccaacgggtcatggacgtgctcgccgagcatctgcaaaccgccgcagatccccagcaccttgccgccataacgcagatgccgcgccacggcggtgtcccagccattggcacgcagataggccaggtcactgcgcacgcttttcgagcccggcaggatgatcaggtcagcggcaggtatcgcctggcccggcccgacgaactgcaaatccacctgggggtgcaagcgcagcgggtcgaagtcggtatggttgctgatgcgcgggagcaccggcaccactaccttgagcacctgggcggccttgtcgatctggcgctggtcgatgccgtcttctgcctccaggtgcaggtccatcacgtagggcagcacgccgaccaccggcttgccggtgcgcgcttcgagccaatccagcccgggttgcagtaacgcgatatcaccgcgaaaacggttgatgatgaagcccttgacccgcgcctgctcactgggcgacagcagttccagggtgccgaccagatgggcgaacacgccgccgcgattgatgtctgcgatcaacagcaccgggcagtccaccgcctcggcgaagcccatgttggcgatgtcattggcgcgcaggttgatctcggccggggagcccgcgccttccaccatcaccaccgggtaggcctcactcaagcgcgcgtgggaggccaacaccgcttgcatcgcaatggctttgtagtcgtggtaggccacggcattcatgctggtaacggcacggccatggatgatcacttgggcgccggtgtcgctgttgggcttgagcaacacagggttcatgtcggtgtggggcgccaggttggcggcctgggcctgcaccgcctgggcgcggccgatctcgccgccttcggcggtcaccgcgctgttgagcgccatgttctgcggtttgaacggtgccaccgcgacgccctggcgtaccagccagcgacacagcgcggtcaccagggtgcttttgccggcgtcagaggtggtgccctgcaccatcaacgtggtcatgtggcgtccttgtaggcggccagggcttcgtcaaggcgcagccagtcggcgtcggtgtcgggcaggcccaagcgcacgctgctgttgtgcacaaacaggcgcagcaggatgccgcgctgggccatgaattcgtacagccgttcagcgtggggggtaatcaaccactggaacaaggcgcagccgccgtgaggttgaaggccgcggcgctcaagcaactcgaacagacgctggccggctgcgatgcaacgactgcgctggcgcgcatgcccggcggtatcgcgcaggcacacttggcccagcacccgcgtcggcccactgacggcccagggcccgacctgttcggccaacagcttgagcaacttgcgctcggccagcacaaagcccaggcgcacgccggccaggccgaagaacttgccgaatgagcgcagcacgatcaagccgacctgatcggcatggctggccaggctcaagtccggggtcacgtcaatgaacgcctcgtccaccaccagccagccaccgcgctgggccaaccgcgcatgccagtccagcaggcgttgcgggctcaggctcaagcccgtggggttgttggggttgaccacaaccagcacgtcgaggctgtcgagaaagaagtcgacttcctgctcctgcacttcgcgcaccacataaccggcgcggcgccaggcttcggcgtgctcggcgtaacagggcgaaagcacgccgaccttgccggaacgacgcaggcgcggcagcagttggatcgccgcctgggagcccggcaccggcagcaacgggccggcgccgtagtactcgctggcagccttctccaaaccgtcatcggtttccggcaagcgcgcccaggcacgcaagggaatctcgggaatcggccacggccagggcgccaggccgctggacaggtcgagccaatccgcttcggcaatgccgtactcaatcgcggccttacgcagccgaccaccatgttcaagcatagatttgcgcccccacgcacaggaccagcagccacaaccatacgccgcgctgcaccagttgccagccgcgatcaatggaatcggcgtcggccggcgggccttcgcccaatggcgggcgctggtgcacctcgccgtgataaatcgccgcgccgccgagctccacacccaaggcgccggcccctgccgccatcaccgggccggcgttggggctgtcccaagtcgggccctgggtgcgccagcatttgagcgccaggcgggttttacccaataacgcgtaggttaaggccaccaaacgcgcaggaatatagttgagcacatcgtcgatcctggcggctgcccagccgaagcgctcaaagcgctcattgcgatagccccacatggcgtccagggtgttgctcaagcgatagagcaccacgcccggcacaccggctaccacaaaccagaacaacgcggcgaataccgcatcgctgccgttctccagcaccgattcggtggcagctcgggcgacttcagtgcggtccagttcgctggtctggcggctgaccaggtaactcacacgggtgcgcgcttcgtccagatcatcacggcgcagggcctgggtcactggggttacgtgctcacccaggctgcgcatgcccagggcgcagtacaacgccataatctccagcagccagccgatatagggcgcccacgacaacgccgtggccagcagggtcagcggcaccacggcgataaaccacgcggtcacgccatggctgcgccagccacgcccaccgctattgaagcgttgctcgatgcgcccggcgaaattgccgaacgccaccagcggatgccagcgcctgggctcacccagcagcgcatccagcgccaccgcagccacacacagcaaggccacactcattgactcactccccacgtgttttcatacagcatgtcacttagcggtcgcggctcggcccagccttccagctgcaacatcggtgccgggtaaaactcggccaccggccccaggcacaacacagccaggggttttgcgccgggcggcaagcccagcagctcggccagggcctggggatcgaacagcgaaacccagcccatgcccaatccttccacgcgcgccgccaaccacaggttctggatcgcgcaggagagcgaggccatgtccatttccggcaaggtgcggcgcccgaagatatggcgctcgcggtcgtccatcagcgctgcgaccagtacctcggcacagtcgttgatgccttcgaccttgagtttcatgaacgcatcggagcgctcgcccaatgcttcggctgtgcgtacgcgctcttcttccaccaactgttgaatctggctgcgcagcgggcgatcgctgatgcggataaaacgccacggctgcatcaggccgacgctgggcgcctggtgcgcggcgtggagcaggcgttgcagcagttcaggcgcgacattgccgccgctgaagtggcgcatgtcgcggcgttcggcgatggcgcggtagacggcctggcggtcggcctcggggaaggcgttgtcagtcatggcctcatcgggggcaagccccctcccacatttggaatgcattcccctgtgggagctggcttgcctgcgatagcggtctcaaggtctggggcgaacaacgcggccaccgcgccaggattcgacggaaaataaaagtgcacataggaggcggtcaaacgcccctgtcggtaaaccgcttcagccccgcgcccgccgttagggctcagaccacgggcaatcggcgcccattcggtactggtcagggaatggtgataggtatgcccacgcaacgtgccctccggcatctcaacgctttgcagcgccagggccgcgagtttcttctgcatcaccgcatcgccttgtaacaagccaaccagttcggcgcgtgtaccctccacatcggtcaacgagtcgagcagatagagcatgccaccgcattcggcgagcagcggtttgccagcggcgtgatgagcacgaatggcgtccagcatcgcggtattggccgacaatgcctggtggtgcagttctggatacccgccgggcagatagaggctgtcagcttcgggcagttgccgatcatggatcggtgagaagaacttcagctcggcgcccatcgcccgcagcaaatccaaactggcgccgtaagtaaaggcaaaggcttcgtcacgggccacggcaatacgcacaccggccagcaagggttcggcttcgatcacctcgggcgcggcaaaggtcaccggcggcggcagggccacttcgcagctgctgcccaacgcctgggcggcagcgtccaggcgcacgtcaagatcattcagttcgctggcttgcaccaggcccagatgacggctgggcagttcgatgccggtctcgcgggacaatgcaccgtaccaacgcaagccctcggtaaggctgccttcgagcaattgcgcatggcgcagggtgccgacgcgattggccagcacgccggcgaacggcaggtcgggttgatagcgcgccaaccccaaagccagggcgccgaacgtctgggccatagcggtgccatcgattacgcccagcaccggtacaccgaagtgccgcgccaggtcagcgctggaaggcgtgccgtcgaacaggcccatcacgccttcgatgagaatcaggtcggcctcccccgccgcctcccagagcaggcggcggctttcttgctcgcccaccatccacatgtccaactggtacaccggcgcgccactggcacgctcgtggatcatcgggtcgagaaagtccggcccgcatttgaacacgcgcaccttgcgtcccaggttgcggtgcaagcgggcgagcgcggcggtgaccgtggttttgccctggccggacgccggagcggcgatcaatacggccgggcaatgacggggctgattcaaagttcgacgcctttctgtgccttgataccggcctggaacgcgtgcttgagcatgcccatttcggtgacggtgtcgcccatttcgatcagttcaggcttggcgccacggccggtaaccactacatgctgcatgggcgggcgcgcttgcaggtcgctgagtacctggtccaggtcaaggtagccgtgcttgagggcgatgttcagttcgtccagcaccaccaagccgatggaggggtcattcaacatggcccgggacaccgcccaagccgcttcggcagcggcgatatcgcgctggcggtcctgggtttcccaggtgaagccttcgcccatcacatgaaaccgtacctgctcggggaagcggcggaagaacaattcttcgccagtgctgttacgccccttgatgaactgcaccacaccgcattgcatgccatggcccatggcccgggccaacatgccgaacgccgaactgctcttgcctttgccattgccggtcagcaccagcagcaggccgcactcgttgggggaattggcgatgcgctcgtcaatcacggcttttttgcgcagcatgcgcgccaggtggcgttcgtcgcgttcgggggaatcagtcatggcagctctccgttggggctggacaaaaacggcgggcaggaaaaaaaaacagacagccaagcatcgcccaccgtgatgctgttggatgatccaggccggtctccgggctcatgagtggcgcttttgatagcaagcagccgagggtgcgccttcccatatcgcacgcgatacagtggcaaacagcaccgtcttgactcatttaccgttgcgggggcagcgccggaatcgcggcagcactgtgtacaagtgcgctcactcaccggcttccctgtttcactccgtcgacgcgtacgccacagagcacctggaacaagccgcgaaggttagtgggttgggggtggagcgtcaattaaagctggccttggacttgaaccatccgccgttcgtgcttctctacccctacaggtatcaaggagaaaaccatgcctaaaacccgactcgccctactgatcatgttcgccggtagcctcgctgcgtgcggcgaaagctcgaccctgcaggtcgccgacggcaccgggccctcgccccggctgccggagccgaacaagacgctgatccccaccgtcaatatcgccccggccatcggctggcccgaaggcgccaagcccatcgcggccgcaggcacccaagtggctgcgttcgccgaaggcctggatcacccgcgctggctctacgtgctgcccaacggcgacgtgctggtggccgagaccaatgcaccgcccaaaccggacgacgccaaaggcgtacgtggctgggtgatggaaaaagtcatggaccgcgctggcgccggggtgccgagcccgaaccgtattaccttgctgcgcgatgccgaccatgacggtgttgcagaaactcgcacggtgttcctggagaacctcaattcgccgtttggcatgaccttggtgggcaatgacctgtatgtggccgattcggataagttgctgcgcttcccctatcagccgggtgaaaccgcaatcacctccccaggcaccaaggtggtggatttacccggtggccccttgaaccaccactggaccaaaaatgtggtggccagccaggacggcagcaagctgtacgtgagcgtcggctccaacagcaacgtcggcgaaaacggcctggaagccgaacagggccgcgccgccatttgggaagtcgaccgcgccagcggccagcaccgcatttttgcctccggcctgcgcaaccccaacggcatggcgtgggaaccacagagcggcaagctgtggacggcggtcaacgagcgcgatgagatcggcagtgatctggtgccggactacatcacctcggtcaaggatggtggcttctacggctggcctttcagttattacggccagcatgtggatgtgcgtgtgaccccgcagaacctggacatggtcgccaaggccatcgctccggactatgcggtaggccctcataccgcgtcgcttgggctgactttcgccgagggcagcaaactgcccgcccccttcagtaatggcgcatttatcggccagcatggttcctggaaccgcaagccgcacagtggctacaaggtgattttcgttcccttcgaagggggccagccgaaagggcaaccggtggatgtgctgacggggtttcttgatagcgatgagaaagccatgggccggccggtcggcgtggtgatagatcaacagggggatttgctggtggccgatgatgtgggcaataaggtttggcgggtgtcggctgttaagtaaataaccacataccaatgtgggagcggggttgcccgcgattacggtggcccagccaactaagccgttgactgacacactgcattcgcgggcaagcccgctcccacattttggagttttattgattcaggggttacgcgccagattccctggcaacacgcgtttagcactcaggtaggcattctgccaatacgctttggatagcgtatccagcttcaccgtaccgccggtttgcggcgcgtgtacgaagcgcccctcccccacataaatgcccgcatggctgacccgcgaaccaccaccggtggcgaagaacagcaggtcgccggtctgcaggttttgttcgctgacgtcctgggcacgcatcacgatcagttcacgggtggtgcgcggcaatgagatgccagcagcgtcgcgaaatacaaagccgatcaggccgctgcaatcaaaacccgagtccggtgtgttgccgccccagcgataaggcgtgccgaccaggcccagcgcacgaaagagcacgtcttcggcagctggcgagaaattctgggtggcatagttgaacaccggcttaggcttgaccgcgacgggcgcggacggcggtgtgcgactggcgcaggcgctgagcagcgcggcgcaaacaataagcatcaggcgggccgaggtcgacatgtgcagaacaatcctggtctggatgcggctttcgctgccgaacgttgaaaaccagaacgcgcaagcaaagctcgcgcgaacggataacaacaatgtccagggattctagcgcttacatgtcaaacttcaagtatcactttaactttacttactagcggtaaccgtcgtcggggccatggcgagtgcgcgcttggcttcgatgaaggttttgctccagtagctgtcaccgaggttatcgacccgaacaccaccactgcggcggctgctggaatgaataaactggttatcgcccaggtagataccggcgtggctgacacgaccgcggccactggtactaaagaaaagcagatcaccgggcttgaggttgtttcgtgcgaccaacggtgcattcacgttgatcatctcgcgcgtggagcgcggcaggttcataccggcttcttcacgaaacaggtagccaatgaaaccgctgcaatcaaaaccggcttccgaggtgccgccgaaacggtaacgggtaccgatcaaggacatgccgcgctcaaggatgctgtcggccagaagtggcagctggtaaggcttgctgtcggagaactcggcgagttctttttcggttgccacctcttcttcataaacagaagcagactgtgcagcaacgaactttgcctgattttgaacctgtggtttttgctgttctgccacctgctgagggtgggaggcgcaaccaaacaacagggtaacgagtgcgagaggcacgaggggtgcgaagcgatttagcatgggcacgaccgtggctgatgtgtaaagaagccgagactatgccctctatcacatcgatttgcaaattcaatcgtgatctatgtgacttcccgtttcgaccgtgacatctaagccgtgattccatttattgcttcagctgcgtagcccttaaggctcaaacgcagggtttctgacgccttgaaaatgccgacatatggaaaatcaagaccttaccaacccaaggtttctttgaggaaagggatcgtcaattttctttgcgcctgtaaagaagcctggtcgagctgttcaagcaaatcaaacagcgcactcatgcttcgggtaccacgggtgagaataaagtgcccgacttcgtcggtcaggtgcaggccacgacgggatgcacgcagttgcagcgcacgcagcttgtcctcgtcggacaacgggcgcatctggaagatcagcgccagggtcagccgcgacttgaggtcggccagcttcaccggcagctcgcggggcgaggtagaagccgcaatcagcaggcgtcggccgctgtcgcgcaggcggttgaacagatgaaacagcgcctcttcccactctgctttgccggccactgcctgcaagtcgtcgagacacaccagttcgtattgctcaaggttatcgaagatgccgatgccgcggtccatcaactctgccaggggcaggtacaccgccggttcgcccatctgttcgaaacgcaggcaagcggcctgcaacaggtgggtgcgccccacgccatgcttgccccacagataaatcaggctttcagtccacccggcgtcggcttcgcagagccgctcgacatagccgagtgcagcggcattggcgcctgggtagtagttgataaaggtagcgtcatcacgcagacgcacacctaggggcagctgaatcggtttcatgctgactgaacggctcccatcgaaccgttagtggcctctgtgtaaagtttgcaaagtttatacccgtgacgccgggcgcacaatgcagcagaccacaagcaaaatcaaaggtttgcgttaactcgcaggtttacgcgaattgtttgacgcacccggcgccaataacaacaaacccggccagggccgggtttgtgacattgcgattacaactcgggctcatccacccctgtgtaaacgtccgaatccttgtacaggtcgtgcacatggcgcaccagcaccatgatcaccgccgccaccggcaacgccagcaggatgccggtaaagccgaacagctcaccacccgccaggatcgcaaagatcaccgccaccgggtgcaggccaattcgatcgcccaccagcagtggcgtcagcaccataccttccaaggcctggccgaccatgaacaccgcgacaatccccagcattgggtacaggtcgccgccaaactggaacagccccgccaccaacgccgcgccgatgccgatcacaaagcccatgtagggcacgatggccgccaggcccgcgatcaagccgatcaacagtcccagctcaaggccgatcgccatcaggcccgcagcgtaaatcacgcccagggccagcatcaccagcaactgcccgcgcacgaacgcacccagcacctcatgacactccgccgccagggaaaccacgcgctcttcgcggtcacggggcagcaggctgcggatcttggccatcatgatgtcccagtctcgcagcaggtagaacgccaccactgggatcagcaccaggttggtcaaccagccgatcagcgccaggctcgacgcggttgcctggctgagcaccaccgtgacgatatcggtggtcttgtccatatgctcgctgatggccgccttgaccttgtcgaacttccagaagccatctgccagcccgaacttggactgggcccacggcattgccgtgtgctgcaaccagtcgagcatctgcggcgccagttcataaaggcggaacagctgcttggccaacatcggcaccaatatcaacaccagcgccgtgatgatcaacgtgaacagcgcaaacaccgtgatcacgccccaggtgcgcgacatgccgactttttccaggcgatccaccaccggatcgaacagataggcgagcagcagcgccaccaggaacggcgtcaggatcgaatgcagcaagaacacaaaaacgcacagcaggacaatcccgccaagccacacccaacgacgcgtatccgccataaaccactccatctgttttttacgccctgcttctatatagaaggaggaacactatttaccaacgaaaacgcagttgcgcctggggctcaggtgcaacagccggttgcgtgccatcgatcacggctggctgggccggggcttcgccagcaggaatttcctgcagcttggccaggctcagttgggtgcgcagttgttcggcgctgccattgacgcgatacacgatccgggtgccatccactaactgcggctggccgccaaagggctccagcaaacggcccagggcggcgtagcgctccaggttcatgccttgcacttcaagcagttgctcactgctcaccccaggtttgaccgcaaagcgcggcgccagcttttggctgaccgccagcaataccgcgtcggcaagcgcggcagtgtcagcgccttgagcggtaccctcctcagccttgtcgcccagccacaggcgccatttggcctgccactggctgccttcctggcgcgcatgcaccgccagcaacgcatcggcaccgtagcgctcggacgctgcacgcaacggcgtggcgtccggactctcaagattcggcgcggtggcaactacctgttcatccaggtctcccagcggcaaacgcagcggcagaccccggtgttgcgcggcccggcgcagggcctgggccacggcctggccatcgccgaccaggctgctgccttcggttgaatcgttcagccaccaacccaggatcgacggccggttgctgccccagatcgacaggcctgcatcacgcaaggcacggtcggtgctgaccgggtcgaagtccacttgcaggctttccggcgggccggcgtcgtagccgtactggctgatgatttgttgcgggtctttgcggatagccgccaggcccgggccatcggcggccttggcgtcgccggtcaggcggatcaccagggtctgcacggcgcgctgggtggcttggtcgcgctcttggggcgactggctgctgaccggttcgagcacttgatagaggccattgagggtttcggcatgactcgccaggctgaccaacgacaaacagcccacaaagaagaatttacacagacgcatggaagattcccgaacgacaaatttagcggttggaacagaccgcgtgatctcggtttggcaaggctgtgacacagcgaccggtaaaacattcacagggtcccggtaagttttcatactgtcataacgctagcgagctcaaggctataccttaatacgcacgattaccggcccgatttgcatttttttgagctcatatgccctgcccgtcggcccgaggatggccgctgcccctcaagcctgataaaatcgcgcgccttcgcagaccgtcaacggcagggccctttccaaaagcccccgcccgcccggtcgttacccagaaatcccccctaaaggcctggatcatgagcaagcaaccctccctgagctacaaggacgccggtgtagacatcgacgccggtgaagcattggtcgaacgcatcaagagcgtcgccaagcgcactgcgcgccctgaagtcatgggtggcctgggcggttttggcgccctctgcgaaatcccggccggctacaagcagcctgtactggtgtccggcaccgacggcgtgggcaccaagctgcgcctggccctgaacctgaacaagcacgacagcatcggcatcgacctggtcgccatgtgcgtcaacgacctggtggtgtgcggcgccgagccgttgttcttcctcgactactacgccaccggcaagctcaatgtcgagaccgctacccaggttgtgaccggcatcggcgcgggctgcgaactgtcgggttgctccctggtgggcggtgaaaccgctgaaatgccaggcatgtacgaaggcgaagactacgacctggccggcttctgcgtgggtgtggtggaaaaggccgagatcatcgacggctccaaagtcgctgctggtgacgccctgctcgccttgccatcgtccggcccgcactccaacggctactcgctgatccgcaagatcatcgaagtgtccggcgccgacatcgaaaacatccagctcgacggcaagccactgaccgacctgctgatggcgccgacccgcatctacgtcaagccattgctcaagctgatcaaggacaccggcgccgtcaaggccatggcccacattaccggtggcggcctgctggacaacatcccgcgcgtcctgccaaaaggcgcccaggcgattgtcgacgtggccagctggcagcgcccggcagtcttcgattggctgcaggaaaaaggcaacgtcaacgaaaccgaaatgcaccgcgtgctcaactgcggcgtgggcatggtgatctgcgttgcgcaggaacacgttgaaaccgcactgaacgtgctgcgtgaagccggcgagcaaccttgggtcattggccagatcgccactgcggccgaaggcgcagcccaggttgaactgaagaacctcaaggctcactgatgccccagacctgtgatgtcgtggtgctgctttccggcaccggcagtaacttgcaggccctgatcgacagcacgcgcaccggcgacagcccggtgcgcatcgctgcggtgatttccaaccgcagcgacgcctacggtctgcaacgcgcccgtgacgcgggtatcgatactcgctccctggatcacaaggcgttcgacggtcgcgaggccttcgacagcgccttgatcgaactgatcgacgccttcaaccccaaactcgtggtccttgccggtttcatgcgcatcctcagcgcagatttcgtccggcactacgaagggcgcctgctcaatatccacccttccctgctgcccaagtacaaaggcatgcacacccaccagcgcgccctcgacgccggcgacagtgagcatggctgcagcgtgcactttgtgaccgaggaactcgatggcggacctctggtcgtacaggcagtggttccggtagagtcaggcgactcggcgcagacacttgcgcaacgggttcatacccaggaacacaggatttacccgctggctgttcgctggtttgccgaaggacggttgattcttggcgaccagggtgcattattggacggccagttactcgcggccagcggccacttgattcgaacctaggagattttatgcgtcgcgccctgcttttcgcttttgcgctgttcgctttgcctgccgtacaagcggcagaccttcaccccttctccgtcagctacaccgccgactggaaacaactgcccatgagcggttcggctgaacgcagcctggccaagaatggcgacggtacctggaccttgaatttcaaggcctcgatgatgatcgccagcttgaccgaaaccagcgtgatcctgttcgacaaggacaccctgcaacccaagagctacagcttcgaacgcggcggcctgggcaaggcgaagaagatcaacctggatttcgaccagagcgccaaaaaagtcaccggctttgaaaacaaagacccggtcaatgtcacgctcgaaagcggcatgctcgacaagtccacctaccagcttgctctgcaacgcgatgttgccgcgggcaaaaaaagcatgagctaccgcgtggttgagggtaccgataccgatacctacgacttccgcgtgatcggctcggaaaaggtccagactaaggtcggttcgatcgacgcgatcaaggtcgagcgcgtgcgtgatccgtcccagagcaagcgcatcacccagatgtggtttgccaaggaccagggcggtatcctggttgccctgcgtcaggttgagaccgatggcaaggaatacaacatcatgctgcaggatggcactgttgacggtaaggccgtcaagggtagctgattgggctgatgtgctggaaagagcctcgctgaatgcggggcttttttttgcctggaattttaggcgcggccactaccgctatcgcagacaagccagctcccacaggggaatgcatttcaaggtgggagctggcttgcctgcgatagcggtaccgaggtcaacctagccgccctgaacatgaaacttttgtcataaagccccggaggtggcgacgcaatgcctcggtttacgcggcctgtagcattgttgcgctttctgcaatgaattattgcgcgcaaaatcagtttacttagcaagctaacaaatcatataacagaggcctgcgacgacttgccgcagatcaaccagagattggagcaagcagatgactgtaaaagtaactgaacgcgacgatgaacatatgtcccatgaagccgtaggccacgggattcacatctgggatgtccatcagcaagacgtattggtcggcatgtttcacaacgagagcgacgcccacaattataaaaacgagctcgaaactctcgaactgcaacgccaggcaaaaagctcctgaagctctgaaatcatgtggacgcccggcccacgcagccgggccgtctacaaggaaccgcgcctttggagcgcggtttttttgtcaataatcgccataaattaatgtaacaaaaacacacacaaataatgattctcgatatcattcgttcgcttttcattcaggctcacgaatcagggaatcaattagatgcatggaaatagcagcaagccagaaaacgcgttactggaacgctggagcgaagcacttgccactgaacaatttcaggccagccacatcagcctccaagccctgatcaacacgctggcacccgccgccgaacgtagcttccaacgcctgatccaagctttgtttcgtgaaagcctgctggcccccagcaccctcctttatgacgagcgtgggcattgctcgctgatactgccttgccaagcccgactacgtttcgaacatttgcgtcctggccgcatggcaagctgggacctgcgcggcgaagtcatcctgttgcgcgaaggccagcccgaacagaaaatccaatttccctcacaattgttgacgttacttaacgccagccttgagtcgcctgctgaccgggaagtgctcaaccgcctcaacgtcgagatcgacgacagcttcatcaacgacaccttgtgcctggccttccatgagcaatggacgctcaagctgcatgcgtccatggacccggtgtatcaagacaatctcctcagtcatctcaagaacagcccgagcgttatcaacccgacttccgtgcttgaacaatggggaacactgggtcacccatggcaccccaactacaagaccaagctaggcctgaataccgagcaagtcatcgactactcgccggaattcgaagcacgctttccggtattgctgtgcgcgctgcatcgccaatttgcccatgtcgaaaagttggccggtaccgccgattactggcagtggtggagcgagcacttcccgcaagcggcacagcaattgaccgcagtcctgcaagcacagggccttcaggcaggcgattatctgccattgccctcccacccttggcaggcacgccaggaactgccccaactgttcgccaacgaaatcggcgacaaactgctggtgctgaccgatatcgtcgcgtttaccgcccaccccaccatgtcattcagaaccgtattgcctgaagggcgttgcgatgcgcctatggtcaaactgcccgtgtcgctgcgactgaccagcgtgcagcgcaccgtctcaccgcgctcagcgcgcatgggcccacggatcagccatttgctgctggccattctggagcgcgagcctgcgattcagaaaatcctcagcatcgttcccgagcgtatcggtgtgcatttcaagccacagccggccaatgacgagcactcccgccacctggcggtgctctatcgcgacaatccccatagccagctccagcccggggaaatggccgtgccggtgggcagcctgtttgccattgatcaacacggccagccgctgctgcgccaatgggtgcgcctgagccaaggcaaggatgacgcggcggccatgctcgccttcttccatgagtacgcggcgatcagtgtgccggcgctgctgggcatgtatttgcgctacggcgttgcattcgaggcccatcagcagaactcctttatggtcatggccgcagacgggcaattgagccgcctgctgttacgcgatttcggcgatatccgtatcgaccgcaaaaccttgcacgcccacggcctggacattgaactgcacgacccgaagatgacgctgtacgacgacgcaggtttcgtaagggacaagctgctgcacaccgtattcatgtgccatctgggcgagctcatcctgcttgccgcgcgccacttcgacatcccccaggcgctgctctggaatgaactgtcggctcaggtcagccagtgttttgacgacctgcgctcgcaggttgatccgcagcgctgggccaccgagcgcgaagcactgctggagcacgcgtggccggccaagtcgttcatgcgcatgcgcctgctggagagtcatgccgatatcgtcgggcggttgcctaacccgttgagcgcggccgccaatgccgactaacaacacagcgctgcggctgctggtggtgattcagttggtgtcgatgggggcgatggagatgagcggaccgttttggccgctgcaaatccagaagctgttgggcgtcgccaatgcccagtacaccggcctgctgtcttcgctggtgtatgccgggccaatgatggcggcgatgatcctgacgcctatgtggggaagactgggcgaccgcaccggccataagctcatgatcatccgcgcgctgctggcgttagcggtgtgccaggcgctggctgcaattacacctgatccatggtggctggtggctatccgtgtagtacaaggcgcattggctggtttcatcgccgcagcccaagcctacgcactggcctgctgcggcgacggcggacgcgggcacattcttgcccggctgcaatcagccactgccgtaggctccctggccggaccggtgttgggcggctggttgatggacatatccggtttcgcattgctgtgctacagcgccaccgccgtctgcctgctgtgcgcgataatcagcgcgtttttacccagcgactcaccacgatcgagacctgcccgcacgtccaagcctgtcgcactccccaaaggctggattggcgcgatgctggggatcatcgtattgatccaggcagccaggatgatgccgcaaccgttttacgctctgtatgtcgcccaggttttgcacgcgcccgcgtggctgatcggcgccagctatggcgccagcgccttgaccctggcactgtccgcgccattgtgggggcgcctgttcgatcggcatcagccagcccatacgctgcgcatcatcgagtgggtcacgtgggcctgcgccttcacgctggcctgcacggcgctggccagtgaatgggtgggttttatcgccagccggctgctatggggcgtgtggcagggtgctttgttgcccgtggcctacacactgatcgccactaccgtagcgcacagccagcagggttttgccctgggcatgggcaatagcgccgccaaagccggtgcgctgtgcggcgccttgttgggcggtatcggcatggggtgggtgggcctggcgcacagcttctggctggtcgcactcacctatgccctggccgccgtaagtatccgcgccatccgttcgtttgcgcgagcgcctgagacatccgatttttctgtcaatacttctaataactctgagacaaacccatgaataaatcgcaattggccgttctgctgccgcttctcggctcgatgagtgcgcccgcctgggccgatcagacagaacagacaccggcagcgccgaccagcctgcaattacaggcaacagtcgtatcggccacgcgcagcgaaaccagcattgcgcagattccaggctcggtgcaggtgatcaatgaagcgcaaatccgccagcagacgggtgcaggacgtcgggtcgccgatatcctcggccaattggtgcctggcattgcgccttccagcggcggtatgagcaacttcggccagacgcttcgcgggcgtaataccctgatcctgatcgacggggtttcgcaaaacgccacccgcgataacttccgccagctcaacagcgtggcaccagaaagcatcgagcgtatcgaagtgatctccggcgccagcagtgtctacggtgcaggcgcctcgggcggcatcatcaacatcatcaccaaacgcaaccaaggtgaagacctggcgttcagcagcaagatcggcatgaccgccggcaacaacttcagccacaaggggttcgcttatcaagcgttccaaagcgccaccgggcgcaagggcccggtggactggtacctctcgggcaacaccgtgcagcgcaacgatcagttcgacggtaatggcaagcgcattccccaggacacgtcccagggcagcaacatggacaccgatacctacgacctgcaaggtcgcttcggctatgagcttgatgacgacaagaagatcagcctgtcgctgcaagactataaagacgaacaagacactcgctacaccaagaacccccgcatcaccagcaacgcagtcgccgtaaaaggcctggacctgggcgaccaaccctacacccataaccaggcggtcaacctcaactacgccgacaaggatttttacggtcagggtttgcaggtggaaagttactggcggcgggcggatgcgctgttcttcccagacctgtcccggggtcgggcaggcgtgtcagacaacaacagcgtgcaggatgtctacggcctgcgggcggcgatcgacacccagatgccggacatcggcccggccacgggcaacctggtatggggcgcggactacgaccatgaaacctcacgccagcgtggcgaccaataccgggtcaatggcctgacctacaccaaaaccggtaccacgttcgaactgggtccggatatcgagaccaccaccaaagccatctttggccaactgtcctacgacatcgacaactggaccttgcgcggtggcgtacgtcgcgaatggattgagagcaaggtctccgacagcatcgcgtatggcgaaatcgtccagaccggcaaccgcgcgacactgcccggtggcacgctcaaatacgatgacacgctgtataacctcggtgcggtgtaccacctgaccgacaaccaggatgtgttcgtcaacttcagccagggcttttccctaccggatatccagcgcttcctgcgtgacgtgaacagcaaatacgatatccaggatctcaatgcccaggccttgaaagtcgacagctacgagctgggctggcgtggcgactgggacaagtggcaggccagtgtcaccgcgtacgaaaacacctcggatgtcacgcagttctatgatgccaatgatcgtgtactgcgcctgatcaatcagaaagaacgcgtgcgtggcgtcgagaccggcctgacctataacatcagcgaccaatggtctgtcggcggtacctacgcgtacgccaaaggcgagacccagcagaacggcaagtggatcgacttgcctgccacccgcatctcccccgccaagaccacagcctttgtcggctatgagcgtgacgactacagcctgcgcttgcagggcatgcgcctggccaattacgacgcggcggccaaggacaacaacggtcgcgatatccagggctacaccctggtcgacctgctcggctcggtaaggctgccggtaggtcgcctggaaggtgcggtgtacaacctcaccaaccgcaactaccagaacatgttcgcccaggccaatgcccgcgcaccgtacccgaatgccgagggtcgtaccttcagcctgagttacgcagtggattggtaacaggctggtgctgcacgtttaaatacaaaccccgccatttggcggggtttgtcgtttttagcggtttaccacatcagatcatctgggatctggtaagcggcgtacggatcgtcctcatccggcacctggctttcggtgaggatgttgagctgcacgatacgctccggagcacgctcctggatcttcagcgccgcctcgcgcgggatcacctcgtagccgccaccgtggtgcacgatcgccagggaaccgttgctcagcttgttacgcatcaaggtgttgaccgacaggcgcttgaccttcttgtcatccacgaagttgtagtagtcctcggtggtcagcttgggcaggcgcgaggtctcgatcagttgcttgacctgggcagtacgcgccttggcctcggctttttcctgctgctgacggttcagctcctggtcacgcttgaccttctcggcctgggcctcggcggccaggcgcgcctgggtatcatcaacttcggcctggcctttgtggaccaggcgctgctgtttctgtttctctttgccgacctgcttggcctgcttttggttgaccagacctgctttgagcaactggtcgcgaagggaaaggctcatggtgcttactcacttaggcaactgctcaaccgcagctggacacattcttttcttggcgtttggcttcgccccagagggcgtccaactcttcgagggtgcaatcttctatgggttggtgcgtatcgcgcaatgcttgttcgataaatcggaaacgtcgttcgaacttggcattggcaccgcgcaaggcggtttccgggtcgaccttgaggtgacgcgccaggttgaccgcggcaaacagcaggtcgcccacttcatcggcgatagccaccgagtcgttatcggccatggcttcgagcacttcgtccaactcttcgcgcacgttatccaccaccggcaacgcggatggccagtcgaaaccgacctggctggcgcgcttttgcaatttggccgcgcgggacaacgacggtaaggcggtgggcacatcatcgagcagggagagttgctcgggagcgtcggacttttctgcgcgctcctcagctttgatctgctcccagcgctccttgacctgttcttcgctcaactgcgggatatccagcggtgcgtacaggtcgccggttgggaacacgtgaggatgccggcgaatcaacttacgggtgatgctgtcgatcacgccggcaaattcaaagcgcctgtcttcccgcgccagttggctgtaatacaccacctggaacagcaggtcgcccagctcaccctgcaggtgatcgaaatcgccgcgctcgatggcgtcggccacttcgtaggcttcttccagcgtgtgcgggacgatggtggcgtaggtttgcttgatgtcccacgggcagccgtattgcgggtcgcgcaggcggctcatcaggtgcagcaggtcttcgagtgaatacatcgtatctctttccgctgaatatctaatgtgagagctggcttgcctgcgatgcttgcgactcggtgcttcagttaaaccgaggtgatgctatcgcaggcaagccagctcccacatgaagcagctaacacaattcagttcgcgcccatccagctattcatggtgtgcggttgcgccgggtttcgatgatgttcggcaactgggaaatccgccccagcaaccgcccgagtgcgtccaaccccggaatctcgatggtcaacgacatcaacgcagtgttgtcttccttgttcgaacgggtgttgaccgccagcacgttgatccgctcattgagcagcacttgcgagacgtcacgcagcaggccggaacggtcgtaggcacggatgatgatgtccaccggataagtgagcaccggcaccgggccccagctgacctggatgatccgctccggttcgcgcccgcccaactgcagcaccgaggcgcaatcctggcggtgaatgctcacgccacggccctgggtgatgtagccgacaatggcgtcgcccggcaacggctggcagcagccggccatttgcgtcatcaggttgcccacgccctggatctggatatcgccacgcttgcccggcttgtagccagtggctttgcgcgggatcagctccagctgttcgttgccgcgctccggctcgaccagttgctgggccaggttgaccagttgcgccaggcgcaggtcacccgcaccgagggcggcgaacatgtcttcggcgatcttcatgttggccttttcggccagcttgtcgaagtccacctgaggcaggcccaggcgcgccagttcgcgttcaagcaaggtcttgccggcggcaacgttctggtcacgcgcctgcagcttgaaccagtggacgatcttcgcccgcgcccgcgaggtggtgatgtagcccaggttagggttcagccagtcgcggctcggcgtgccgtgcttgctggtgatgatctcgacctgttcaccggtttgcaggctgtagttgagcggcacgatgcgcccgttgatcttggcgccgcggcagttatggccgatttcggtgtgcacgcggtaggcgaagtccagcggcgtggcgcccttgggcaagtcaatagcgtggccgtcaggcgtgaagatatagacccggtccggctcgatatccacccgcagttgttcggccaggccgccgatgtcgccgagctcctcgtgccattccagcacttggcgcagccaggaaattttctcttcgtactggttggacccggccttgacgtcggtgcccttgtagcgccagtgcgcacacacccccagctcggcctcttcgtgcatggcgtgggtgcggatctgcacttccagcaccttgccttcagggccgattaccgccgtgtgcagcgagcgatagccgttttccttggggttggcgatgtagtcgtcgaattccttgggaatgtgccgccacagcgtgtggacgatacccagcgcggtgtagcagtcgcgcatttccggcacgagcacgcgcaccgcacgcacgtcgtagatctggctgaaggccaggcccttgcgctgcattttgcgccagatggaatagatgtgcttggcgcggccgctgatgtcggcgtccacgccagtggcttgcaactccgaacgcaactggcccatcacgtcgctgataaagcgctcgcggtccaggcgccgttcgtgcagcagcgtagcgatctgtttgtactggtcgggttccaggtagcggaaggacaaatcctccagctcccacttgatatggccgatgcccaggcgatgggccagcggcgcgtagatgtcgaagacttcgcgggccacgcggttgcgcttttcgtcatcagcggtcttcaccgcccggatcgcgcaggtgcgttcggccagcttgatcagggcgacgcgtacgtcgtcgaccatcgccaccagcattttgcgcaggttctctacctggccctgggtgcccagcaccatcgactggcgcgggctgagactggcgctgatggccgccatgcgcagcacgccgtcgatcagcttggccaccaccgcgccgaaacgctggctgaccagcggcaacgcaatgtgcccttcgcgcacgccgcgatagagcacggcggcgatcagcgaatcctggtccagcttgagatcggccaggatctcggcgatttccaggccagtgcgaaaacttgaagtgccttcggcccacaggttcttggccgcattgtcttgctgttcagactcacgagcgaactcgcaggctgctttcaaggcttcacggtccagtgccgggtcgacactgacggcatgatccagccatgcctcgagattgatactgccgtcggtgttgatcggctggtgtgctctcacctgtaccatcttgcttaccttccctacgacgcaccttcgatgcgccaaaatcatcgccgacttttactgcgagctccgtggcagtgttcaggccctggagaacgcaggccagtcggattaaacgggcatcctagcccgcttcaaataacgccatggcctcgacatgcgcggtctgcggaaacatgtcgaggatcccggcacgctttagccggtagccttgcttgaccaactcaaccgtgtcccgcgccagcgtggctgggttgcaggacacatacaccaggcgcttggcccccaaggctgcaagtttgcgcacaacctccagggcaccatcgcggggtgggtccaagagtaccgcagaaaagccctgtttggcccattctgcgtcagtcaaaggctgggacaaatccgcctgaaaaaactcggcgttatgcaaatggttgctgacggcattgagcgccgcacggtccaccatggcctgcacgccctccaccgccaccacttcgcgcacattgcgagccagtggcagggcaaagttgcccaggccgcaaaacaggtccagtacccgttcgtcggcttgtggcgccagccaatgcagcgcttgggcgaccatcgcctggttgaccccggcattgacctgcacaaagtcgcccggtcggtacgccagctccaagtcccaggcatccaaacgaaagcccagggcctgacccggctcaacgggctccggctgcccttccccgtgcagccacaattgggcgtcatggaaggtgcagaattccttgaggatctgcaggtcagcctcggacaacggcgccatatgccgcagcaacacggcgatggacgaaccgctgaacaactcgacatgccccaacgcctgcggtttgctcaagcgacgcagcatcgctggcaaacgctgcatgatcggttgcaaggcctgtaccagcaccgggcaatcatcgatagcgacgatgtcctggctggccacggcgcgaaaacccacttcgagttgcttcgccttggcgtcccaacgcacggctacgcgggcgcggcgccgataaccgaactccggcccgctcaacggcgcggcccactcttgcggttcgacacctgccacccgcgacagttgctcggcgagcatgcgctgtttcagggcaagttgctggtcatgaggcagatgctgcacgctgcagccgccacagcggccaacatgagcgcagggcgcagggcgccgcagctcactcgcctggaacacccgctcggtgcgcgcctcgaccactttgccatgggcgcccaacacccgtgcttccacctcttcgccggccaacgcaccattcacaaaccaggtgcggccctcaaagaacacgatgccccggccgtcattggccaggcgctcgatggtcaggcgctgtttcttgcccacgggtatctgtggggcccggctgccgcccgtcggttggaagcgcaggcctctctcgtgcttggccatcagttgggttcgtcgaaaatgccggtcgacaggtaacggtcgcctcggtcacagatgatcgcgacgatcaccgcgttttccacttctttggacaagcgcaacataccggccaccgcgccaccggaggacacgccacagaagatgccttcctcacgggccaggcgccgggtggtgtcttcggcttcgcgctgggccatgtcgatgatgcggtctacccgcgtggcgttgtagatcttcggcaaatactcttcgggccaacgacgaatacccgggatggccgcgccttccatcggttgcaagccgacgatctggatcgccgggttctgctccttgaggtagcgcgagttgcccatgatggtaccggtggtacccatggagctgacgaagtgagtgatggtgccctgcgtctggcgccagatctccgggccggtgctggtgtagtgcgcctcggggttgtcgccgttggcgaactgatcgagcaccacgccacggccttcggcggccatgcgctcggcaagatcgcgggcgccttccatgccttcttcctgggtaaccaagatgagttgggcgccatacgcggtcatcgccgccttgcgctcggcgctgccgttgtcgggcatgatcaacaccattttgtagcccttgatcgccgcggccatggccagggcgatcccggtgttacccgaggtggcttcgatcagggtgtcgccgggcttgatctgcccacgcaactcggcgcgggcgatcatcgacagcgccgggcggtctttgaccgagccggccgggttgttgccctcaagtttgagcaacagggtattgctggtttcacccgccatgcgttgcaagcggaccaggggcgtgttgccgacgcaatcggcgattgttgggtactgcaaggtcatggcgtattcgcaatccagactgcggggcgcacatcataccgggaaaggccggcgggccatatcacgcaaagtgcggtgcttatggcttaaaggcataagcagcgtttatgtcgggtcgctatgattacgctggaaaacttcagcgcccatcgcggcaatctgcccttcgatcagcgcttcaaagggtttgagcagtggctcaaacgacgtcggcgcttccaatacctgcaacgcttgcgtgatcgcttcgaccgtcgataaggcgccaggccccggcgccttgcgcaagcgatagcgggaaacaccgccgtcggccaatgtcacccggggcagcgccgccaacaaagggttgaggtgcaacagcttgcgtgccttgcgccaggtgccatcgggaaccactaacagcagtggctgatcgtcaggtgcgtaggcgtgcagcggctcggcttcatccgccggaaacaacaggcgtgcccgatagccaggcgggttcaatagcgtcgccaggtcatcaaacacctcccccaccaccaactgcgcgttgttcaggcccaacgccgccaaccgcgcagtattgagcgcatggccgacctcgctcgggtgctgcaacaccaacacgcgggtgcggctgtcgaggtgggggatcagcgcacagaggcagtgcgtggtcgggcgcaggcagcgcgggcaatggggtcgggacatggtgttttcaggcctggttgagctgggtcttgagcaaatcgcgaaaagtctggatcagtggctcgcggctgcggccacggcgcatgatcatcgaaaacggcgcctggtaaccgaaggtggctggcagcaaaacgcgcaggtcgcccttgtccgcccaggcctgggcgtagtgctccggcaggtagccaatataagcgcccgacaacaccagaatcagctgcgcctccatactttccaccgtcgcagcgctgtgcttgaagccgtggcgcgccagctcggcctggctccagtaacctcgcccgaccatgcgttgctgggtgatcacttgttccgggatgcgccgctcgttaaacagcgggtgccgggtgctgcaatacaaccagtgctgttcgcggtacagcggcatgtagatcagcccgctcatgcggttggaaaacgcgccgatggccaggtccaggcggttgtcctgcacccccagttgcaattcgtaggggctcatcaccgacaggtgcaaatgcactgccgggtgctccaggctgtaggcgccaatcacttcagcgaacggcaaggccttgtcgctgacggtggagtcgagcacccccagcttgagggtgccacgcaattcgcctttcaacgcagcggcgtattgctcgaaaccttcaagttcgcccaacaggcgcagggtttcctgatgaaacagctcgcccttgctggtcaggctgaagccgccacggccgcgatggcacagcaccaggcccaaggcagattcaagttggctcatgtaggtgctgatggccgacgtcgacaggttaagttcgtgctgggcgctggcaaacccttgatggcgcacgacgctgacgaagatgcgcaggagtttcaggtcgggcaaggcgttggccatgggggctccaggggggcacactaaaattgtgggagctggcttgcctgcgatggcgctgtatcagccacccggtctatccctgacagaccgccatcgcaggcaagccagctcccacatttggatggagtttaccccaggctttagtttagaaaaatctgaactaagtatttgcctctgccgattcttcctacgccaggcttttcgcagaatcggcccctgacaactaaaacaacgaggcaatcccgtggacaagattctccaccaaccactgggcggcaacgaaatgccgcgcttcgccggcatcgccaccatgatgcgtcttccccacctgcaaacggccaagggcctggatgctgcctttatcggcgtacccctggatatcggcacctcgctgcgcgccggtacgcgcttcggccctcgggaaatccgcgccgaatcggtgatgatccggccctataacatggccaccggcgccgccccgttcgactcactgtcagtggccgatatcggcgacgtggcgatcaatacctttaacctgctcgacgcggtgcgcatcatcgaagaggcctacgatgagattctcgagcacgacgtcatccccctgaccctgggcggcgaccacaccatcaccctgccgatcctgcgggcgatccacaaaaaacatggcaaggtcgggctggtgcatatcgatgcccacgccgacgtcaacgaccatatgttcggcgagaaaattgcccacggcaccaccttccgccgcgccgtggaagaaggcttgctcgattgcgaccgcgtggtgcagatcggcttgcgtgcccaggggtataccgccgaagacttcaactggagccgtaagcaaggctttcgcgtggtccaggccgaagaatgctggcatcactccctggcgccgctgatggccgaagtgcgagaaaaagtcggcggcggcccggtgtacctgagcttcgacatcgatggcatcgaccccgcctgggcgcccggcaccggcaccccggaaatcggcgggctgaccaccatccaggccatcgaaatcatccgcggctgccagggcctcgatctgattggttgcgacttggtagaagtgtcgccgccctacgacaccaccggcaacacctcgctgctgggcgccaacttgctgtacgagatgctctgcgtactgcctggcgtcgcgcatcgctgatacagcgtcttcacattaacaatcaaggggatctaacaggtccccacaacgatgtacctgactttcgctcgcgtgtttaccgagccagctgccgcctgatcgcccataaaaaatataatcggagaaccgccgtcatggctttggatttattcgtcgtactcatctacgccgccggcatgctggtgctcggctactacggcatgcgtcgcgccaagacccacgaagactacctggtcgccggccgtaacctcggcccgtccctgtacatgggcaccatggccgccacggtactaggcggtgcctccaccgtcggcaccgtgcgcctggggtatgtgcatggtatttcgggtttctggctgtgcgccgcactcggcgcgggcatcattgccctgaacctgttcctggccaaacccctgttgaagctgaaaatcttcaccgtcacccaggtcctggaaaaacgctataaccccatggcccgccaggccagcgcggtgatcatgctggcctacgcgctgatgatcggcgtgacctcgatcctggccatcggcaccgtgctgcaagtgctgttcgacctgccgttctggatgtcggtactggtgggcggcggcgtggtggtggtgtattcgaccatcggtggcatgtggtcgctgaccctcaccgatattgtgcaatttgtgatcaagaccgtcggtctgatgttcatcctcttgccgatctgcctgtaccgcgtcggtggctgggatgagctggtggccaagctgccgacgtcgaacttcagcttcaccgcgatcggctgggacacgatcatcacctacttcatgatctacttcttcggcatcctgatcggccaggatatatggcaacgggtgttcaccgcccgtgacgaaaaggtcgcccagtacgcaggcactttcgccggcttctattgcatcctgtacggcctggcctgtgcgctgatcggcatggccgcccatgtgctgatcccggacctggacaacgtcaacaatgccttcgccgcgatcgtcaaagcttcgctgccggacggcattcgcggcctggtcatcgccgccgcgctggccgccatgatgtccaccgccagcgccggcctgctcgccgcctccaccgtgttgaccgaagacctgctgccccgcctgcgcggcggcaaggcgtcgagcctgcgtatcaaccgcctgtttaccctgttgaccggcattgccgtgctgggcatcgcgttagtggtgaacgatgtgatcagcgccctgaccctggcctataacctgttggtgggcggcatgttggtgcccttgatcggcgcgatcttctggaaacgcgcgacgacctcgggcgcaatcacctccatgagcctgggctttgtgaccgcgctggtattcatgttcaaggatgggctggatgcaaacacaccgatctactacagcctggcggtggcgctggcgagctttgtgctggtgagcttgctgtcgcgtcggccggccaaggtggcggctgcggtggtttaagctataacagggacggggatattttcttcagcgggcgcgacgtcggaggtcgcgcccgtttttttcgcctgatagaaagtaattgtgggagcgggcttgctcgctcccacattttttggaccgcgtgattagcggcgacgtggccgacgctgctcgtcatccgtgcggatcggcaccggttgcagtggaggctcgatcaagcccaatgcaacgccaaggtcgtggagccagttttggattttctctttcatgattgccccctttgagggtagtgctggccggcgtgagttctgtcgccgtttcctacagtgatagtagccctaagtcctaggtaatgcttgaaggaaaccacaacgaactattactgaattgatccgaatcctgacggatcgttcaagcaatggcacgtgtgtcttgcacgcatcgcggattgccgtcttgctgcaggtcgatccatgcattgaggttagcgccgagcataccctttcgccacatcagccaggtggtcgcagtggcaaaaggcccggtcagcggatgaacggacacgctgtccttgccgggcaggctgtcgagcatggattcagacatcaacgccacgccggaacctgcaatcacgcaggcgagcatgccttggtaggactcgatctcgatggctcgccccatcgccacacgctcgtgggaaaaccaggtttccaggcgcgtgcggtaggcgcaactgcgccggaacgtgaacaccgcacggcccgccacatcctgggggccacgcaccggcgggtgatcggcctcgcaaatcagcaccaggcgctcttcgcacagcggtacgccatccagggtggcgatggtcagcgggccgtcgacaaaggctgcgtccaggcgcccggtaatcagcccttccagcaactccccactgggcgccgactgcacctgcaggttcaccatggggtaagacttgtgatagcgcgccagcagctttggcaaatgaaccgcggcggtgctgtacatgctgcccaagacgaagtcaccggccggctgcccgccttgtaccgcgccgtgggcttcgtcgtgcagcgccagcaggcgggtgctgtaatccagcagtactttgcccgccggagaaagctgcaaacgctggcgctcgcgcacgaacagatcgacgcccagttgctcttccatttgtttaagccgggtcgacaggttggagggcacgcggtgcaggcgctcagcggcgcgggtgatggagccctcttccgccacggcctggaaaatgcgcaattgactgaactccattactttctccaaaaatgaacaagttactcactattattcaattttacagaaagtcaatccgtcttagcctgcaaggcattcgcttctttgcaggaaacctgaatatgtccccgctgattcgtttactcgccagcttcgtcgccctgatgatggccatgggcattggccgcttcgccctgactccgcaaatgccgcatttgctcagtgaaggccagatcgacctgaccggcgccggcctgctcgctgccgccaattacctgggttatttcgtcggcgcggtggactcgatctttgcccgtagccatcagcatgtgcgcgggcgcctctacggcgggttgtggctgtgcgtattgctgaccctggcgtcctactgggctaacgggttctggccgcatttgttgctgcgtttcggcactggggtcgccagtgcgtgggctctggtgatgattaccagcctgagccaaccactggcgattgccgccggccgtccacgcctgggtgcgctggtgtttgcagggccggggttggggattgtgctgacggggctgctggcgctggtttccaacctattggggcaaagctctgcaacgctgtggttgctctacgggacggtggcgctggtgatgttgctggcgatcctgccatttttacccaagccggccatcactgttacacaggccgccagcgcggggagcaacggcagcatcgcgcacctgtgctggatttatttcttgttcggcctgggctacatcatcccggcgacctttctgtcgcagatggccagcgctcaattccacggggcctggcaggccgatctgttctggccctactttggcctggcggccgcgctgggagtgggggtggccagcctgcgccgcaagcacccgaataccacccgtcactggctaatggcgactttatggctgcaagcggccggggtgttcgcctgcctgcttggcaatggctggggcttggcgctgggcgtgttgctgtgcggtgcgccctttctggcctgcatgcaactggtgatggcgcggctcagagaagtcgcgccccatggctaccaacgcagcacggggttgctgaccgccagcttcgccgtcggccaattgagcgggccactattggcgtcggtcagcagccatctcagtggcggcctgcaaccggcattggtcgttgccggtaccgggttgttattaggcggttcagtactgatcaaccgccctctaccgccgcagccgatttgcacacaagtggccaacagtgcagcaaatggcggttaggcacgtgccccacgccatgtccatcagcgccaacccagcggaccagccttgaagcgtggcccagttgctcaagtcataggtgccataggccaccaggccaagcaaggcgcccaaacgcgcagcgcgctgccaactggcgctgggcaagaccaccaatactacgcaaccgaggacatacaggagatagaacaataccgcaggcagcaggcgtggctgatcaagcatcagcgcgccgagcagggatttgtaggtggagcccatgagcacgccgagccagaggccgtcgaggaccaggaaggcgagcaaggtgccgaggtaggcaaaaaccgttcttttcgacatggcacaaccctgtaggagcgagcttgctcgcgaaaaacgtacatccgacgccacactgcgcctggaatattttcgcgagcaagctcgctcctacaggagagcagcctgtactcagcttagttcaatgcggtccgcatgaatcacgatctgcccttgcttgtagagcgcaccaatggccttcttgaagttgcccttgctcacgccgaacaagttgctgatcaccgccgggtcgcttttgtcgctgaccggcagggtgccgttgttgtcgcgcaacttcgcgaggatcttcgagttcaggctggaggccgcttcctggcccaccggttgcaggctcaggctgatgttgccatcggcgcggatctctttgatgaaacccttctcttccttacccggacgcaggaacttgaacacttcgttcttgtggatcaggccccagtgcttgttgttgatgatcgccttgaagcccatgtcggtggcttcggccaccagcaggtcgacttcctggcccacctggtagttggctggcgtcttgtccaggtaacggtcaaggcgagcggtggcggtgatgcgcttggtgtgcttgtcgaggtagacgtgcaccacgcaatactcacctgcggtcagctggcgtttttcttccgaatacggcagcagcagatccttgggcaaaccccaatcaaggaacacgccaatgctgttgacttccacaactttcaaactggcaaattcaccgacttgaactttgggtttttcggtggtggcgataagtttgtcatcgctgtccagataaatgaaaacgttgagccagtcttcatcttcactgggaatatctttagggatataccgattaggcaagaggatttccccatcttgcgcaccatcgaggtacaaaccaaagttagtgtgcttgaccacttgcaagctgttgtagcgcccgactaaagccatttccaataccctcattgcgtgggcggcattctacccgagttgggccctgcacgcgcgcgcgcctgaaaaatcgcgggctggcatggcgttccaatggcagcgccccactcgtctgatcgttcggttcactttgagcaggccatcagcgggccacccggcctgtggtttccagctaaaacagtaagttagcgctttatttcggcgttgaacttcggctatttccagcgctggatattaatcctgagggatatttgccaagcaattgtcaagtatttcctgtacgatgcctggccaagttaattttctacaggttagtggccgccatgcgtgtaaaagcatccaacagcaaagcaaagccagctcccgccgttgaaaccagcgaatcgatcaatagccagattgctgcgttcctcaagtccggcggcgaaatccagcaaattgccaagggcgtgagcggccagactttcggcccgtccaagcagatcagcctgggcaagaagtaatagtcataccctcgcactgtatctggtccctaagcgtcttgccttcaaggcgctaggactagagttgcaaccccctcccaacaccttcaatacgcagctaatcgacgaacgggcctcaacgcctggcattcgccggtatccttgcacacgtctagcacgggcatccgcctgaatctttccgttactgctcctcgcttttcatggagtgaagcatgcttaaacgctgtattgtcgtggtcagcctcctggtcgccagccctttggcccaagcgcatatcttccagcgtgaactgggtgacttcgacctgaaattaggcaccacccccacccgcaccatggcccagggcctggtcaagccgaccgcccctggcagcgactcgttccacggtggcctggaccttacccacgatagcggcctgtatttcggccagttttccccgaacatgggcctgtcgtcggccaataaccttgaagtcgactcctacatgggcttcaagcgtccgttcgaccagaccctgggctacgaagtcggcttgatccactacagctaccccaaggtcagccccctcgatagccaggagttctacggtgggctgaacctgttgggcaaccgctttggcgtgtctttcagcaacgaccccgaccgccaggacagtaccctgttcgccgacctgggcggcacccagccttttggcatcggcgtcagcatgaagtacaccacccatcaactgggcacaccggtctcggtagagaacggcgccatcagcagtttcagcgattggtcggtgcaattttcccgggcctggaaaggcattgacctggacttgatctacagcggctccagcctcagcggcagtgactgctcggcctactctggacacaattcgcaatgtgatgggctgttgaccttgaaggctgcacggtcgttttattgatgggctgaactgtcgcaccccgcgcaggttcacatgcattaacgccctccatgcaaggacctgcccatgttgcgccggctcaaactcctgatggtattgctgaccctgagcctggtgcttgccggctgtaatcgcgtgggcctggcctaccgaaacctcgacgtgatcatcccctggaccctcaacgactacctggacatgaatgccgggcaaaagagctggttcaacgacaccctcaaggagcacctggcctggcactgcaccacgcaattgcctggctacctggactggctcgaccgcctgcaacagatggtcgacagcaaccaggtcaccgacgccgcgttgcaaacccgtactgtcgaagccaaacaggcaattgccgagattgcgcgggaaatcaccccctcagccgtgcaattgctgcaaggcctggacgatcagcaggtcaaggacatgagcgacgccctggccaaggacctgcgtaaacgccaggacgaatacctcaagccgccgctggcccagcaaatcaaggaacgcgccgaacgcatgagcaagcgactggacgcctggatcggcccgttgagcccaggccagcaaaaccgcgtaacagcctggtccgccgagttgggcgcacagaaccaggcatggatcggcaaccgtgcccattggcaggcgcaatttatcgaggcgctgcaacagcgtcacagtgccgatttcccgcagaaaatccagcaactgctggtggatcgcgaaagcctgtggaccccgcaataccgcgccgcctacgcacagaccgaagccgccgcgcgcggcttgctcgtggacgtgatggcccaaagctccccagcgcagcgcgtgaaactcacccagaaaatcgacaaggtccgcagcgacttccagacgcttaaatgcctgaaaagcgcacagtcttagtcaggcgccaaggtgcccagccaggccaccaggccaaggatgagcaccacagcgccaaactccagggccatgctgcgccgtaacgcacggatcgccacgttataatcgcccgccgcgatagattgttgcagaagcggcgtcaggtgaaagcgattgagcgccgccaaggccagcatcacgccgaacaaccccagcttcaggcatagcagcaccgcgtagactccgccgttgatgccccccagattcggcccgacaacaaacagataattggcaacgccagtgccgatcagcaccaagacaaatcccgcgccaatgcgctcaaagcctgccaatgcgctggccagaacctgcactcgatcatcctgtggcaacggcgcaggcatcaacaacaaaccgaatgccgccaacgcccccacccaacccgccgctgccaacaggtgtgcactgtcgctgacgatatgccacacaccttgcacgccttcgtgcattacgccgtgccctgtccacaccagggtggccaacgccacgccagccgacagcgtggccagcgccagatgagtgctcagtgccgccaggaccagcgccgcgatacgcacccaccacgtcagccccaagtcggtctgccacagcatcatctgcacatgcggccatagcgcctgccaatcagtggcgccgctcatggattgggtcatgaccaatagcgacgccaccgaaaacgccagccccaagccgcccgtcaatcccatccatgcccttagattgagccatctacgttgctcagcgtgcagaccataaaggccgaacagtcccaatccaaatagcatcatcaggtcgagatagagcgcgaagcgcaatgcgatggagatcagctcactcatggctgcacgctgaacaccacattaccggtgatcggatgtgtatcggacgacacggcacgccaatccacccgatagctgccggtggtaagtgcggagaccggcttgatcaacatcaccttggggtcgctgctcgccgacacgctggccttcaccggcatcggcgaattgggcatgcccggcatgtcggtcatgatcaacttggccccggaaaactgggtcagcaggttttctgagaaatgcaattcaatcactgcgggagcggcgccctgtgcgcctgccgccggaatggatgacagcagcttggggtgggccgaagcgggcaggctaagacttaaacctacccacagcgcagcacccagcagcgtggttttcaacatagacatgcaagactccaggccgcgccaggcggcgaataataaaaagggaaacccgtcagaaccacaagcgcacgccgacgacccagcgcagttgattgatgtcttcgtcttcgtcccgtgcgtattgcgcggtctggccataagcccggttccagctgaccccaacataaggcgcaaactcgcggcgaacttcgtagcgcaagcgcaggcccagttcactttgcgccaagcccgacccgacaccccgttgcggatcgttctgcgcatagaagttgagttctgcggtgggctgcaggatcaggcggttggtgagcaggatgtcgtagtcaccctcaaggcgtgcggcggtatgccccgattcgccgacaaacaacgtggcttcggcctcgaagttgtagagcgccatgccttgtaggccaaaggccgcccagctctggctagcaccgggcttgaagtcctggcgcacgccgccgaccacatcccaccacgggctgattgcgtgcccccataacgcttgggcttcggcgctttcagtgcggccggcgctgcgttcgccttcactgcgtagccacaaccggtcgatgtcaccgccgacccaacccttgatgtcccaactctgcgcgttgccgtcgccgccctgccattccaactggttgatcagcagcatcgagttcacgccgctgtcgtgcacctgatgccctcccggcgcgctgtagaccgctgcacggtctgcgtcggtcagcgccggaatcggcgtacggctttgcgtcagcgctggcgtcgccgggctcatgccctgaaattcatcctcggccgccaacgcccatggggcgaaccccagcgtggcgaaagcgatgcaaagggctgagaagcaacggttcacgctcgcttccttattcatgcacgcgcacctcacggaacatgcccatttccatgtggtacagcaggtggcagtgataggcccagcgccccagggcatcggcggtgacgcggtaactgcgacgggagccgggaggcatgtcgatggtgtgcttgcgcacctggaactggccgttttcgtcttccaggtcgctccataagccatgcaggtgaatcgggtgggccatcatggtgtcgttgatcagcaccacccgcacgcgctcgccataagtcagttgcaacggctcggcatcggaaaacttcacgccattgaacgaccaggcgaacttctccatatgcccggtgaggtgcaattcgacggtgcgcgaggggtcgcggccatcggggtcttcgaaggcactgcgcagatcggcataggtgagcacccggcggccgttgttgcgcaggccaatcccagggtcgtcgagcttgggcaccgggttcatcgcctgcatgtctaccagcgggttgttctgttcgctggcggggtgtttctgcatcgccatcgcgcccatggcgctgtgatccatgccttccatgcccggcatatcggccatggcaccgtgatccatgccacccatgcccatatctgccatagtcagccacgggcgcggatccagcggcggtaccggcgcagtcgcgccaggctgcctggcaagggtgccacgagcaaaccctgtgcggtccatggactgggcaaacagggtgtaggcgtctgctacgggctcgaccagcacatcgtaggtttccgccacggcgatacggaattcgtcgacgctcaccggcttgaccggctgcccatccgcggcgatcacggtcatcttcagcccgggaatacgcacatcgaaataggtcatcgccgagccattgataaagcgcaggcgaatcttttcccccggcttgaacaccccggtccagttctgcccaggcggctggccgttgagcaagtaggtgtaggtctcaccgctgacgtccgcaaggtcggtggggttcatcttcatttgcgcccacatcagccggtcggcagccgtggccgaccagccctgctcgcccacatcccggataaaatcgcccagggtgggtttgtgcaggttgtagtaatcggactgctttttgagggtcttcatcagggcgacggggtcttcgtcggtccagtccgacagcatcaccacgtagtcacgctggtaggtataaggctcgggccccttggggtcgatgaccagcgggccatacacgccctgctgttcctgaagcccggaatggctgtgataccagtaagtgccgtgctgtttgaccttgaactggtagacgtaaaggccgcccggctcgatgcccttgaagctcaggccgggcacgccgtccatggtcgatggcagcaggatgccgtgccagtggatcgaggtgggctccccaaggcggtttctcacgcgcagggtcacggtgtcgccttcgcgccagcgcaacagcgggccgggcaggctgccgttgacggtcaacgcagtgcgcgcacggcctgtcaggttgacgggggtctggtcaataaacagctcaaattcgctgccggcgagtaccgtgggctggccggggctggtcagcgcccacaccggcgggcgccaaagcccaagcccgccgagcaggccgcctgcggccaggcctttgacgaatgtgcgtctggaggttgtggagtgcatgccgattcaagtccgtgagttgaatggcagcagattaggattcgccggctgtcagcaaccttagcggcagattaccgattcgacaggttcgcccggctcccttggggcgccgggacataaaaggatcaagcgatctgggctttggacgccacttcagcgaacgttgccggatcaagcgcatctacctgttcatccaacacctgacgcggatgatcattgccgggaatcgaactgtcgatcagcgccagcaattgcgcacccagcgccgtcagaatgaaattctcgccattgccgccctcttcttccggccgcgattcaataaagccacgcttgaacagcagcgcctcgtaatcggcagcggtcttcttcagtgcgtccaggttgccagtgtcctcgccggccgtcgccttctcggccgcttcctgctcggcgtatttgcgcggggcaaagctgccctcgccgttctgcacttcatgcagcagacgttcgatcagatcccaattgtaagtcgtcatcctgattcctcctgcaggccgatggagttagcccgtctaagggagtgacacgtcctggcactggccgttcaaccgaacggacgggcgtcatttctctgaactttccagaggttcgccacctcaactgcacatcactgccaaggaagtccgaccatgaaaaccttgatgaagctgaccctcgccgccacgctgttaagcgccctgcccgcctgggcctgcacgcccgaggaggccaccgccaagcgcgaagaactggccaaggaagtaaccaagctcaccgagcagaacccgaacaaggccaaggagatgaatgccaagctgcagaagatggacctggataccgaaagcgccgagtttcccgacaagtgccagttgatcgatgcgcggctcaaggagctcagagaagctgcggggaagcgttgagcacagcgcgacgcagagcgtctctggaggcattcccacgcggagcgtgggaatgatcatggcgaaaaaaaaccggacattgtccggtttttttatgcccgcctgcttattcggcagccggtgcttctggcttgcggcgcttgagcggggccatgccgtccttgctgacgagcgacaggttgtcggtcttcggccggttggcgatcttgcgcttggtcggcgacttggcgccggttttcttcttgtcgcccttggcgtcggtctttttcttcttcacgccaacggccttgcccgaggccttgaccttcttcggcccggtgtacgtgcctttgacttccttgatggtacggcgctcgaacgactgcttgaggtagcgttcgatgctcgacatcaggttccagtcgccgtggcagatcagcgagatggccaggccatcattgccggcccggccggtacggccgatacggtgcacgtactcgtcgccgctgcggggcatgtcgaagttgatcaccaggtccaggccgtccacgtcgaggccgcgtgcggcaacgtcggtggccaccaggatcttcacgccgcccgccttgaggcggtcgatggccagcttgcggtccttctggtctttctcgccgtgcagcacgaacgccttgtattcctgcgcaaccaggcgcccgtagatacggtcggcggcagcacgggtgttggtgaacacgatggccttctggtaggtctcgttggccagcaaccagttcaggatctgttctttgtgcacgttatggtcagcggtaacgatttgctgacgcgtggtggcgttcaggtcgctgacgttgttgacctgcaagtgctcagggttgttcagcaccttggcgaccatgtcgcgcagggtcgaaccaccggtggtggcggagaacagcatggtctgctgacggttgacgcactcgccgaccagacgctgcacatcatcggcaaagcccatgtcgagcatgcggtcggcttcgtcgagcactagcacttcgacttccttgaggtcaaggttgccagcgttgagctgctcgatcatgcggccaggggtgccgatcagaatatccggcaccttgcgcagcatggcggcctggaccttgaagtcttcgccaccggtaatgatgccggacttgatgaaggtgaactgcgagaaacgctcgacttccttcagggtctgctgggccagctcgcgggtcggcagcaggatcagcgtcttgatgctgacgcgtaccttggccgggccgatcaggcggttgagcaccggcaggacgaaagcggcggtcttgccgctgccggtttgcgccgtcacccgcaggtcacgcccttgcagcgcgagcgggatggccgctgcttgcacaggcgtaggctcgacaaatttaagctcggccacggctttgagcaggcgttcgtgcagggcgaattgggaaaacacgggtgctacctcgaagaaatacaaaatatcagctgcataggttaccggtttcgcgcgcccaaaccgagtttctttacgcgaacggggctaatcagctgcttttttgtcagcgattttgtccagagcgtcaactttgttgcacttaaatgctctaatcgccccgtgttgtcttacagaagaatcggttcactcatggatatcaaacagctctggctcaacgtccaagacctttggggcgccctcgatgaacacccggtcctgcattccagcctcggcttgctggtgttgctggtggtggcattggtggtgggacgggtcgcccgttacctcatcctgcacgcggtcaaattgctcggccggcaaccggcgctgcactggctgaacgacctgcggcacaacaaagtcttccatcgcctggcgcaaatgacgccatcgctggtggtccagttcggcctgtacctggtgccggacctgagcaagaccgccatcctgttcatcggcaacgtcgccctggcgatcagcattctgttcatggtgctggccatgagcgccctgctcaacgcgctgctggatatctacgcacgcaccgaacacgcacgcacccgctcgatcaagggctatgtgcaactggcgaaaatggtgctgttcgtgtttggcgcgatcatcatcgtcgccacccttatcgaccgctcgccgctgttgctgctgtcaggcctgggtgcgatgtcggcggtgattctgttggtgtacaaggacaccctgctgtcgttcgtcgccagtgtgcaattgaccagcaacgacatgctgcgcgtgggtgactggatcgaaatgccccaggtcggtgccgatggcgatgtggtggatatcaccctgcacacggtgaaggtgcagaactttgacaagaccatcgtttccatccccacctggcgcttgatgtccgagtcgttcaagaactggcgtggcatgcaggcctccggtgggcgccgtatcaagcgcagcctgtacatcgacgccagcggcgtacgcttcctgaacgatgaggaagaagtgcgcatgacccaggtacacctgctcagcggctacatcagccgcaaacaggccgaactcaaggcctggaacgaggcccagggccacagcgcgcaactgtcggccaaccgtcggcgcatgaccaacctcggcaccttccgcgcctacgccttggcgtacctgcaaagccaccccgacatccagccgaacatgacctgcatggtgcgccagatgcaaaccacggcccagggcgtgccgctggagatctactgctttacccgcaccaccgcgtggggcgattacgagcggatccagggggatatcttcgattacctgttggcggtgttgccggagttcgggctaagcctgtatcagcagccaagcggtaatgacctgcgcgccggcgtgctgcctgcgttggccggagccacgcaggtgtccgtcgccgaaacggcatgaggtgatgcgaacgggattacggcagtgacgccgtaatctccttgcggcacacctcaagcacttcatcggccagggcggaatcgtccgggcacgcccgcgacagcatgattgcgccaatggcatgggccatgctgtcgagcattttcgcccgcacgtcttcctgtggcccgtcatgaaccgcgttgtactttgcttccaaggcctgcagggtgttttccaagccgtcggcaaaggtcgccttcagcgtgtccgattgacgggcagcatcggcacacaacgccgccaatgtgcatccaccgccgcgatgatcgcggtgctgcctggacaggtaaacctcgaaaaactgctccacctccatctccgcgctatcagccagtgactgcgccaggctgttggcggccgcttccgccatcaggtccgccttggaaccgaagtgcttgtaaaagccgccttgggtaaaaccggccgcagccatcaactcggccacgcccacgccatcgaaaccccgctcgcggaacagttcggaagctgtcgcgacgatatgggcccgattgctttgtgactgcgccttagtgatcttcatgtgtgtgtggtcctgcacgcttgcgagataggcatattactatgatgttgatcataatcaaaaccgttgacagctttgattatgaccgacatcataaaacctcctcgcactcacagagcatcacaccatgagcacttccaacaccgttctgatcactggcgcttcgaccggcattggcgccgcctacgccgaacgctttgccgcacgcggccacgacctcgtactggtcgcccgtgacatcacgcgcctggaagcgctcgccgccaggttgcgtgagcaccacgccgccaacgttgatatcctcccggccgacctgacccagaacgctgacctggccgcagttgaagcgcgcctgcgcgacgacgccagcattggcaccctggtcaacaatgcaggcgccgcgcagtccggcagttttatcgaacagtccaccgacagcgtcgcgcagttggtcaccctcaacaccaccgcgctggtacgcctggctagtgccatcgcgccgcgcctggcggcagccggcaacggcgctatcatcaacattggctcggtagtgggcctggccccggaattcggcatgacggtgtacggcgcgaccaaggcgttcgtgctgttcctgtcccagggcatgagcctggaactggcgcccaaaggcgtatacgtgcaagccgtgctgcccgccgccacacgtaccgagatctgggaacgtgcgggcattgatatcaacaccctcacggacgtgatggaagtgggcgatctggtggacgcggcgttggtgggcttcgatcgccgcgagccggtgaccattccgccgttgcaggacggcgcccgctgggatgcgttgcaagctgcgcgacaaggcctgctgacgcagatcaagcagtcccaggttgccgagcgttatctggccaacgcctgatcaaccggtagcaggcgtgctccgcgcctgcccttctcagccaagcaacgagcattgaaccatgaaggcattttccatcgaacggtacggcaaacagcccggccgcctcatcgaggcccccgcgcctatcgtgggtgagcacgacgtgctggttcaggtgcgagccagcagtgtcaatgtgctggatgcaaagatcgccaaaggcgaattcaaactggtcctaccgtatgcgttgccgttgacactgggcaatgacctggccggcgtggtgctcagcgtcggcgctgcggtacgacgcttcaagccgggggacgaagtctacgcccgcccgcctcagcagcgtatcggcaccttcgccgagttgattgctgtgcacgaagacgcactggcgcgcaaacccgcgaatatcaacatggagcaagccgcctccctgcccctggtcgcgctgacggcgtggcaggtgctggtggaaaccgcgaagctgaagaaaggccagaaggtgttcattcatgcgggctcaggcggggtgggcagtatcgctatccagttggccaagcatttgggcgccttcgttgcgaccaccaccagcaccgccaatgtggagtgggtcaaggcgttaggcgcggatgtggtgatcgactataaacagcaagccttcgaggccgtgctgcgagattacgatgtggtgctcaacagcctaggcgcggatgcgctggccaagtcactgaagattctcaagcccggcggtcaactcatctccatctccgggccgccgacgcccgccttcgcccgtgcccagaagctgccatgggtattgggcctggtcatgggcctgttgagcagcggtatccgcaggaaagcacgcaagcaaggcgtgagctatgactttgtgttcatgcgtgccagcggcgcccaactggatgaaatcaccgcgctggtcgagtccgggattatccggccggtcatcgaccgtacctttcctttcgaatccacagctgcggccctggactatgtcgaacaaggccgcgccaaaggcaaggtggtgatcacaatggcgacggcaccgcccgacgcacacccagccggctgatccacaccgcccccagaatcaccagaccgcccagggccaaacggcccagcggttcgtgctggttccagatcaacaggttcagcaacagccccaccggcacatgcaggttgttcatcaccgccagggtgccgccattgaccaggcaggcgcccttgttccaccagtacatgcccagcgcggtgctgaccaacccgaggaacaccagcacaccccattgcagcggcgcttgcggcaggaagtcagctttgccgaacagcaggaacgccggcaacaccaccaacaaggcgcccaggtagaaataaccgaaacgccgaaagtgcggctggtcactgggataacgcgccaccaggtgcttgtacatgacttgcccggcggcgtaggtgaagttggccaattgcagcagcaagaagcccatcaaaaagtgcggggtgatctgatcgaaacgaatcaccgccgcaccacccaccgccaccaaggccgccaccagcgcccagggattgaagcggcgattaagcgcgtcctcgatcagcgtcacatgcagcggtgtgaggatggtgaacagcagcacttccggcaccgtgagcacacgaaagctcaggtacaggcagacgtaggtcacgccgaactgcaatgcgccgatcaccaacatgccgcgcatgaacgcgggctccaccgagcgccagcgcgtcaaaggaataaagatcagcccggccagcaccacgcgcaccagcacggcaaagtagctgtcgacgtgaccggcgaggtattcgccgatcaagctgaaggaaaatgcctgaatcagggtgacaaccagtagatagcccatgcgcgcctcgtttcgaatgggcgcgacagtaaagctttttgggttttgaggaaactcggcgcaaaaaaaacccgacctcgctaaagcggcagtcgggcaggagcactcaggagcaaaaagtgcaaagggaggttcgatacgcgtacttgaagggtttgcgtggggctatataagcagcacgggattatctgacgattaacgcctcaggccacctgggccagcagtgccttggcgtgattgacgcccttctcctggaagtcgccgcccaggttgacgccttcggcgtgaatgaaggtaacgtcatgaatgccgataaatgccatgacctggcgcaggtacggttcctgatgatccgaggtggcgccggtgtggataccaccgcgtgcggtaagcacgatagcgcgcttgccggtcaacagcccctgaggcccggtggcggtgtatttgaaggtcacaccggcccgcaacacgtgatccagccaggctttaagggtgctcggaatggcgaagttgtacatcggcgcgcccatcaccaacacgtcggcggccagcaattcgtcagtcaactcgttggagcggtccagggatacctgttcgtcgtcgttacgctgctccgcaggcttcatccagccacccagcaggttggcatccaggtgggggaccggattgagcgcaacgtcgcgcacggtgatgtggtctgccggatgggcgacttgccattggctgatgaactgttgggtgagctggcgggaaatggaatcctgctggcgcgcactgctttcgatgatcagaacattggacatggcttcgtaggctccatcggtaattgctgtaagtcgatggagagaaggttagccagggcccattcgataaaaaagcgcaaaaaactgctacaacccatctagaaatttgtttatatgcggagtattcctgtgggcatgctccgctgttgctttattttggcgcgcagtccaaggcaatgcgcatcttgatgatggagcgattgaacttgaccgtggtgttagtgcttttgccagcaggcacggtcacggtacgacggcgtggcgattccgggccattggtgaagattaccgaacacacagcatcccgggtgccgtagttgcttagctgaatcgaactgatgtctgcgtccacatcggacgcggtgtaatcaatgctgacgccatcgatctttttcgtcacgtcgataggataggcaaacgcgctcatcggcagcagcgccagcaacacacaacacaattttctcattcggcagtctccaataaggaccgccagcttaggacaagaggagctcatcttgaaagcgccccgcgttaccctcgatcaatggcgcaccttgcaagccgtggtcgaccatggcggctttgcccaagccgccgaagcgctgcaccgttcgcaatcttcggtgagctacaccgtggcgcgcatgcaggaccaactcggcgtcccgctgctgcgcatcgacgggcgcaaggcggtgctgaccgaggccggtgaggtgctgctgcgccgctcccgccaactggtgaaaaacgccagccagctggaagacctcgcccatcacatggaacagggctgggaagccgaagtgcgcctggtggtggatgccgcctaccccagcgcacgtctcgttcgcgcattaaccgcctttatgccgcaaagccgtggctgccgggtgcgcctgcgcgaagaggtgctgtccggcgtcgaagagttgctgctcgacggcatggcggacctggccatttgcgggtttatcatccccggctacctgggcacggaaatgagcgatgtggagttcgtcgccgtggctcaccccgatcactcgctgcatcgcctcaaccgtgagctgagtttccatgacctggagagccagatgcaggtggtgatccgcgactccggccgccagcaaccgcgcgacgtcggctggctcggcgccgaacagcgctggaccgtcggcagcctcgctaccgccgccaccttcgtcggcagcggcctgggctttgcctggctgccccggcacatgatcgagcgcgaactcaaggaaggcgtgctcaagcagcttcccctggaaaaaggcggcagtcgcaacccgacgttttacctgtactccaacaaagacaaacccttggggcccgccacgcagatccttgtggaattgctgcgcacctttgacaccgctcccttggacgcgccctttgccgccccccaacaagcctgaaacggagttcacccatggcctggttcgaccatgaaggctgcagcctgcattacgaagagtatggccatggcaacccgctggtcctgatccacggcctgggctccagcagccaggattgggaactgcaagtaccggtactcgcccgacactaccgcctgatcgtagttgacgtgcgcggccatggtcgctcggacaaaccccgggagcgctacagcatcaaggggtttaccttcgacctgatcgccctgatcgaacacctcgacctgccagcggcccacgtggtgggtttatccatgggcggcatgatcgccttccaactggcagtggatgaacccctgcgggtcaagagcctgtgcatcgtcaacagcgcgcctgaggtcaaggtgcgcagtgccgatgactattggcagtgggccaaacgctggaccctggcccgcgtgctcagcctgggcaccatcggcaaggccctgggcgatcggctgttccccaaacctgagcaggccgacctgcgccgcaagatggccgaacgctgggcaagaaacgacaaacgtgcttatctcgccagcttcgacgccattgtaggctggggcgtacaggaacaactgtcgagaattacctgtccaaccctggtcatcagcgccgaccatgactacacccccgtggcgcagaaagaaatctatgtaaaactgctgcccgatgcgcgactggtggtcatcgaagattcccgccatgccacgcccttggaccaacccgaggtctttaacgcgaccttgctcgattttctaaagaccgtcgaaaccactacccaggatcactgacccatgctgaaaaaaatcgccttctttgccggttccgccttgttcgctgccaacctgatggcagctgagccggccaaggcgccacatgttttgctcgacaccaccaacggccagattgaaatcgaactggacccggtcaaggcgccgatcagcaccaagaacttcctggcctatgtcgacaagggcttctacaccaatacgatctttcaccgcgtgatcccgggcttcatggtccagggtggcgggttcacccagcaaatgtcacaaaagccgaccgaagcaccgatcaagaacgaagccagcaatcgcctgcataacgtgcgtggcaccttgtccatggctcgcaccaatgacccgaactcggccaccagccaattcttcatcaacgtggctgacaatgccttcctcgacccgggccgcgatgccggttatgccgtgttcgccaaagtggtcaagggcatggacgtggtcgacatcatcgtcaactcccagaccaccaccaagcaaggcatgcagaacgtgcccatcgatcctgtgatcatcaagtcggccaagcgcatcgactgaggtctgcaggcagctttgcgcggtgcccacacggcaccgtgcacctttgaaaggagagcccgcccggcgggcgtcaaacctaatgctctatcgtcgttttgaacagctgatcgatattttccgcgacgcccccagcgcggcccctcccgaaaaagtcctgcccttctatctctattacctgcgccaggtgtggccgtgctttgccgcgctgttggtggtggggctggtgggcgccctgatcgaagtggcgttgttcagctacttgagccgcatcatcgacctggcccagggcacgccaccggcgaacttcttccagatccacagcgccgagctgatctggatggccgtggtcgccctgttgttgcgcccgctcttcaacggcctgcatgacttgctggtgcaccagaccatcaaccccggcatgaccagcctgattcgctggcaaaaccacagctacgtgctcaaacagagcctgaatttcttccagaacgatttcgccgggcgcatcgcccagcggatcatgcaaactggcaactccttgcgtgactcggcggtggcgaccgcagaggctatctggcacgtgtcgatctacgccatcagtgccctggtgttgtttgccgaggccgactggcggttgatgattccgctgatcacttggatcgtttgctacagcctggccctgcgttatttcgtacctcgcgtgaaagaacgctcagtggtctcctcggaggcgcgctccaagttgatgggccgaattgtcgacggctataccaatatcaccactttgaagctgttcgcccatacgcagaatgaacaggaatacgccaagcaagcgatcatcgagcagaccgaaaaaacccaactggccgcccgcgtactcaccagcatggacaccgtgatctgtattctgaacggcctgctgattgtcaccactactggcctggccctgtggctgtggacgcagtcgctgatttccgtgggcgcaattgccctggccaccggcctggtgatccgcatcgtcaacatgtccggctggatcatgtgggtggtcaacggcatcttcgaaaacatcggtatcgtgcaggacggcctgaaaaccatcgcccagccactggccgtggtcgatcgtgaaaacgctccgcgactgacggtgccccacggccaggtacgctttgagcaagtggacttccactacggcaagaagagcggaatcattggcggcctcaaccttgagatcaaggccggggaaaaaatcggcttgatcggcccgtccggcgcgggcaagtcgacgctggtcaacctgctgctgcgcctttacgacctgcagggcgggcgcatcctcatcgacggccaggacatcgccgaagtggcccaggaaagcctgcgcgcacagatcggcatgatcacccaagacacctcgttgctgcaccgctcgatccgcgacaacctgctgtatggcaagcccgacgcgactgacgaagaactgtgggcggcggtgcacaaggcccgcgccgatgagttcatcccgctgctgtcggactccgagggccgcaccgggctggatgcccatgtgggtgagcgcggggtgaaactctccggcgggcaacgtcagcgtatcgctatcgcccgcgtgctgctcaaggacgcgccgatcctgatcatggacgaagccacctctgcgctggactcggaagtggaagcggcgatccaggagagcctggaaaccctgatgcagggcaagacggtgattgcgatcgcacaccggttgtcgaccatcgcacgcatggaccgcctggtggtgctggaaaaaggccagatcgccgaaagcggcagccattccgagttgctggcatacggcgggctttattcgcggttatggcagcatcaaaccgggggatttgtcggtatagactgattttgttgggtaaaccgccgttcaattccgaacaattctgacagctttctctatctgcctggtcttgcgacacaatcctgctgtactgcaatcaggccccaggagggccctgatttaaggcggcagggaagccacacagaccgttaatcagatagagcaatctaaggaagtgttcatgtcactgttcaaacgttccgtaacggaaggactgggtacgttttggctggtgttgggtggctgcgggagtgcggtgttggccgcagcgttcccccatgtaggcatcggcctgctcggtgtgtcactggctttcgggctcacggtactgaccatggcgtttgccatcgggcatatcagcggctgccaccttaacccggccgtctcggtggggctggtggtcggcggcaggttcccggccaaggagttgccagcctacatcgtgtcgcaagtgatcggaggcgccatcgccgccgcactgctgtacttcatcgccagcggcaagcctgggttcgaactggcctccgggctggcaagcaatggctatggcgagcattcgcccggtggttattccatggcggcaggctttgtttgtgagctggtgatgaccgcgatgttcgtgctgatcatccttggcgccaccgaccgtcgagccccggcaggcttcgcgcccatcgccattggcctggggctgacgctgatccatctgatctccatcccggtgaccaacacctcggtcaacccggcccgaagcacggggcctgcgttgattgtcggcggctgggcgctgcagcagttgtggctgttctggctcgcgccgatcctcggcgcggtgatcggcggcaatacctaccgatggttgggtgcagaaaaaacagcttgacccactccctgcaggggcgagcttgctcgcgaaaaacgccaacgatgacgcggtgcttaaagctgtaatcccgcgtcgtctgcacgttcttcgcgagcaagctcgctcctacaaggtgttttacgttccgtcagagtgccgataaggcaaagccgccctcgcctcttcggcatacgccagaacccccacccgttcgcgctcaagaaaatcctccacagcgttcttcaaccccgggtggcgcaggtagtgccatgagcgcgtaatcaccggttcaaacccgcgaatcaatttgtgctccccctgggcaccggcatcgaagcgttgcaggccgtgggcgatggcgtagtccatgccctggtagaagcaggtttcgaaatgcaggcggtcgaattccgccaggcaaccccagtagcggccatagaagctgtcgccaccaagcaggctgaaggccatggccaccgggcgcgtgccttgtttggccaagactacgcggatggctgcgggcatgcgttcagccagcaggctgaaaaacgcgcgggtcaggtagggcgattgccggcgcaccgcgtaggtgttggcatagcaggcatagacaaagtcccattgcgcttcgctcagctcatggccttgcagccactcgaactcgataccctgccctgccacttgttcgcgctctttgcgcatctgtttacgcttgcgtgaactcagggcgtcgaggaaatcctggaagtcgcggtagcctcggttctgccaatgaaactgacaacccaggcgttgcaaccagccggggtgttgagccatggcttcatcggccagggcatcggtaaagttgatatgggcgctcgacaggccttcgatctccagataccccggcaggctattgagcaattcgaaagcgtctgcggcactggcagccaacacacgcggcccaccgaccgggctgaacggcacggccgtcagcaacttggggtaatagtcgatgccggcgcgctcgcaggcatcggcccagccgtgatcgaacacgtactcgccatacgaatgccatttgcgataacccggcaatgccgccatcaaccggtcgccttcccagtgcagcaaatgctccgtctgccagcccgaatgcgggccgacgctggcactgtcttccagcgcgctcagaaacccatgctgcataaacggctgggcctgtggcatcagggcatcccacgtgtgcgcagcgatatcggacaggctgtccaggcgttgcagcggcatcggcatcctcattgtttcttggcatgaaaacctggcgagtatcgctgatcacagccgcacacacacccagaaaacacgcggacagacgtcaaaacccttagttccgtagcgcaacgatttgtcatctagatgaaatcacttagccactactccgtcataaacggtcgcgatactgacgccagtttttagagcgtccgggtctaccgggcgacattttttccgtccgtcatgggtcggttgtgttctggagggtgttgccctccctcctcactttcggagattgatatgcgtcttgcttccactaaaactgcggcggtcctgtgtggcggcctgttgctggcactgagcgttccggccagcgctgcagtcgacgctaaattgctcgacatgctcaaggccaacggccagatcaccgcggcgcagtacaccgaactgcaaatggaactggccagggatcagaaagaacaacagatcgcccgccaggctcaacaagagaccaacgagcagatcgcggccactgcgaaaaaaaccaacgagctgagcagcttcgaccagaaattggcttgggcagccaagacccagttcaagggtgatgtgcgcttccgtcaggaaaccatcaagatcgacggcgagcccaacaacggtgggcgtgacaaggaccgtcaacgtatccgtgcgcgcctgggtgcctacaccgaaatcaacccgcaagtggacaccggtatccgtatcgccaccggcggcggcgacgatgcacgttccactaaccaggaccaagatggttacttcgataagaaatcgatctggctggacctcggctacatcgactaccacccggaccagatcaagaacctgcacgtgatcggcggcaagatgctgcaaccgtgggtgaacatgggcgacgtgatctgggatagcgacatcaaccctgaaggcctggccgtcacctacaaatacccgctggggagcagcgcagaactgttcggcagcctgggtaactacaacctcaaggacaacgtggacggtgacggcgtgcaatttcgccatgacctgcgcctgacgtccggccagttgggtacgcgtttctcggtcaccgacaacctgaaaatgaccttgggcggcagcatctacgcctacaagaatgacgaagacagccgttgcacaaccaccaccacgccttgcgcattggcggtcaacggcaactcggccaacaacgaattccgcttgtacgaaggctttgcgcaagcagacatcggtggcctggctgtgccgctgtcgttctacggccagtacgtgaaaaacaacgatgcggtgaccgaccaggacaccgcctggttgctgggtgccaagtccaaggtgttcggtttgaacctggactacaactaccgcgacgttcaacgtaatgccgtcgtaggcgccttcaccgattcggacttcgccaacggcaccaccggttcgcgcggtcacaagatgaaagtcagctacgacatcgacaagaacttcgccatcggcgccacctacttcctgaccaaggctgactttgccagccggacccagcgggatgccgacaccaacaccttgcaactggatgctgaagccaagttctaatgcttaacttgtaggagcgagcttgctcgcgaagaacccacaggcaacgcggttctccaggatacccgcgttatcgttgacgttcttcgcgagcaagctcgctcctacatgatgtctttacgccgctcggccgccagttgttcagccagcgcatccacaccctccaccggctcctgcggcatacgcttgagcgtcgcctgcatcaggcgcatctgacggataaagcgccggcagttcgggcaaaacatcaagtgatgacgcaccataagacgctcccgaaaggtcaattgcccatcgagatagtcactggaacgcgctacttgctctttacaggtcaacattcgcccgtttcctcaaaatgctccaccgtggcgaagactttaagccgtgctcgatgcaacagcacacggacgttggagagtgaaagggtgagaagattacagatctcttccagctccaggccctggcgttcacgcaacaccagcacactgctttgtaattcggacaagctcagaatcgtatgctccaggcattggcgcaattcatcttcggtcagcagcgcttccggggtgtcctggtgccaggcatacggggcgacagcccaatggccatcatcggggctgaagcggtcatcgccgatagtgccgtggggtgagggcaagtcgtcgagcagcacttcccgacgattttgtttgtaacgactctttgcggagttggcagtaatggttaataaccacgtcttgaggctggatcgcccttcgaacttggccaggttgcgcaccaccgagagccaggcatcttgcaccacctcatcggcatggcgctggccgacgatggcataggccactgcccgcattgcactctggtaggtgttgaccaattccttataagcctgctgctcacccttgagcaggcgttcaagcaggtgcgtgtcgtccgctgctgccattcaaacctcgatctaaaagtgcacacccgaccctgtgggagctggcttgcctgcgatgcagacacctcggtgtatcaggcacaccactgtgatgccatcgcaggcaagccagctcccacatactcagcgtttgcgcaggatcacactgccaatcgaatacccggcgccaaaggagctgagtacggcaaccgcgcccttgggcaggtcatcctgataagtgtgaaacgcaatcaccgagccggccgagctggtattggcgtaagtatcgaggatcaccggcgcttcttccaccgacgcgtcgcgccccagcagcttcttgacgatcaggtgattcatgctcaggttggcctggtgcagccagaaacgcttcacatcggtcacactcagctggttttctgccaagtgctcgccgatcaattcggccaccatcgggcagacatcacggaacaccttgcggccttcctgcacgaacagcttgtcgggagcgccgatgccctcttccgcggtgcggttgaggaagccgaagttgttgcggatgttgttggagaacttggtcagcagcttggtgctcaccacgtcgaactgatgttcggacgtcgccaggtcagcacgctccagaatcaccgccgtggcggcatcaccgaagatgaagtggctgtcacggtcacggaagttcaggtggccggtgcagacttccgggttgaccatcaggatcgcccgggcctggcccaactggatgctgttggccgcgttctggatgccgaaggtggccgaggaacacgccacgttcatgtcgaaaccgaaaccctggatacccaaggcttcctggacttcaatggcgatcgccgggtaggcgcgttgcaggttggagcaggcgacaatcacgccgtcgatatcggcggcggtcttgccggcgcgctgcagggcttgttcggcggcaccgatggccatctggcaaagcaccgaccattcgtcgttgctgcgctcgggcaggcgtggagccatgcgctgcggatcgaggatgccgtccttgtccatcacaaaacggctcttgatgccggatgccttttcgatgaatgccgcgctcgactcggtcagcgcctgcacatcgccacgttcgatagcggcggcgttgtcggcgttgaactgttgtacgtaggcattgaaagactgcaccagctcttcgttggaaatgctgttggccggggtgtacaggccagtgccgctgatgacgacgttatgcacggtcgttcctctaaatctgtcaggcagaagatattggtaccgtcgtaccaaacttaaagtggtttgatgtcatccagcgggcatcaaactggcaatgcttttattcactcttgtaaccgcgaagtttgccacaaccctggggatttggcgctataggccagacaaacatcccattgtgggatggggcttgccctaatgcctgtaggagcgcgcttgctcgcgaagaacccacaggcaacgcgcttatccaggatacccgcgttatcgttgacgtttttcgcgagcgagctcgctcctacaggtgggccaggggttcagggctctacctggctccattgcttgctcaggcgcttatcggaaatcggtaccttggtgcccaactgctgggcaaacagcgacacccggtactcctccagccaccagcggtacagctccagttgcgggtcgcgcttgccttcctgggtgtgtttgttcaggcggttctggtactgcgcccacaaaccgcctaactcgctgctccacacacggtccttttgcacctggctcggcagtttttccaggcgcagctcgatggccttgagaaaacgcggcagttccttgaaccactgggccggggtttcccgtacaaagcctgggtacaccaggttgctcagttgctgcttgatatcgttcaaggccacggcctgggccaggtcgatcttgcccttgaagcgcttttgcaggccgtgccagagcttcagcacctccagggtcaggcgcgcgaggcgctcggcgtgctcggtccaactgccgcgcttgcgttcagccaaggctgccaggccagcgccatcgcgtggcaggctatcttcgccttcaagtacacaggtatcgaggctggccagcaggatgtcttcgaccagcgcgtcgatacgccccagttcacggtacatgaggcccaactcggtcaagcccggcaatttgccgcgcaggaatttcgccggttccgccaattgctgcatcagcaggcgctgcaaggcgcgacggtgctggaactcggcttcggcggcagtcgagaagcgcccctccttgaccgcgccgttctcttccaccagggccgggtacaccgtcatcgacaggccggcgatgttttgctgggtcttttgcgccaccgccgcaaacaccttggcctctaccggttgctggcttttcgcggtttgcggcacggccaaggcggcctggctggcttcggcgaaccgtgcggtcagctcggccaggtcgcggccttcgccgaggaacttgccctggccgtcgaccacttccaggttcatcttcaggtggttttccacctgctgcgccgcctcggcccacgcctcatcgctgacccgcgcaccggtcatgcgcagcaattcacgccccagcgcctggggcaacgagccctggccgaattcgatgcgttgcagcgcggccttgacgaagtccggcaccggcacgaagtttttgcgcagcgccttgggcaagttgcgcaccagggcgatgcacttggcttcgatcaaccccggcaccagccactccaggcgctcggctggcaacgccggcaacaacggcgccggcacccgcagggtcacgccgtcacgggggtggttgggttcgaagtggtaactcaaggccagggccaggtcgcccaagtgcaaggtgtccgggtaatgcgcggcggtgacttcactggcctcgcgggccagtacgtcctcttcgcgcatgatcagcagttgcgggtctttctggctgttgaccttgtaccaactgtcaaaggtggcggtctggtgaatctctgcgggcaagcgcgcatcgtagaaggcgtacagggtttcttcgtcggccaggatgtcgcgacggcgagccttggcttccagctcatcgagttgctccagcagtttctggttggccgtcaggcacttggcacgggactgaatctcgccacgtaccaggccttcacggataaacagctcgcgggacgccaccgggtcaatcggcccgtaatgcaccggccggcgcccgaccacgatcagcccgaacagggtgatctgctcaaacgccaccacctggccgcgcttcttctcccaatggggttcgaagtggtttttcttgatcaagtgcccggccagcggttcgatccaatcggcatcgattttcgccaccatgcgtgcatagagcttggtggtttccaccagttcggcggtcatcagccactgcgggcgcttcttgccgatgcccgaagacgggtgaatccagaagcgtcgctgccgcgccccgaggtagtcgccgtcttcggtcttctggccgatctggctgagcaggccggacaacacggctttatgcagcttcggatagtcggcgggctctttgttgaggctcagctgcatgtcgcggcagatcaggctcaactggcgatgggaatcacgccactcgcgcaggcgcaagtagttgaggaagtttttgcggcaccagttgcgcaacgggctggcggtcagttcctggcgctgctcctcgaaaccgcgccacaggttgaccaacccggcgaagtccgaatccgggtctttccactgtgcgtgggcttggtcggccgcttgttgacgctccggcggccgctcgcgtgggtcctggatcgacatggcgctggcgacgatcagcacttcctgcaaactgccgagcttggccgcttccagcaacatgcgacccatgcgcgggtccaccggcaagcgggcgagctggcggcccagcggtgtgagctggctgttgcggtccaccgccgagagttcttgcagcaggttgaaaccgtcgctgatggccttgccatccggcggttcgataaacgggaaatcggtgatctcgcccaggcgcaggtgcagcatctgcaggatcacggcggccaggttggtacgcaggatctccgggtcggtgaattccgggcgcgcgataaaatcttcttcgctgtacaagcgcacgcaaatgcccggctcaacccggccgcaacggcctttacgctggttggcgctggcctgggaaatcgcctcgataggcaaacgctgcaccttggcgcggtagctgtagcggctgatgcgcgccgtgccgctgtcgattacatagcgaatgcccggcacggtcagcgaggtttccgcgacgttggtcgccagtaccacgcgccggcccgggtgggactggaaaatgcgctgctgctcggccggcgacagccgtgcgtacaacggcaaaatctcggtgtgtttgagctgggccttgcgcagcatatcggccgcgtcacgaatctcgcgctcgccgggcaaaaacaccagcacgtcgccagggctgcggcgttcgctgcgttcataggcggcgatttcatcgagggtagcaaggatcgcctggtcgacagtcaggtcgtcctcgacgcggttgccctcctcgtcctgttccagggtgagcgggcggtaccaagtgtccaccgggaaggtacggcccgacacctcgacaatcggcgcatcgtcaaaatgcttggaaaagcgctccaggtcgatggtggccgaggtgatgatgactttcaggtcggggcgacgcggcaacagggtcttgaggtagccgagcaggaagtcgatgttcaggctgcgttcgtgggcttcgtcgacgatgatcgtgtcgtagcgttccaggtagcggtcgttctgggtttcggccagcaggatgccgtcggtcatcagcttgatcagggtgttggcatcgctctggtcttcaaagcgcacttgatagccgaccaacgcgcccagcggcgtggccagttcttcagcgacgcggctggcgacactgcgcgcggcgatccgacgcggctgggtatggccgatcaggccgaactggccgcgaccgatttccaggcagatttttggcaactgcgtggttttacccgagccggtctcaccagcgatgatcagcacctggtgtttgttcagcgcgtccttgatctcatcgcgcttggcggcaatcggcaggctgtcgtcatagcgaatcaccggcaggctggcgcgccgcgccgtgacctgggcacaggatgcctgcatgcgcgccacccactgcgccagcttctcctcgtcgggcttcttgcgcagctcaagcaactggcgccgcaagcggtggcggtcggcgagcatggcgtgatcgagggttttgagcagttggtcgagggtgggtgcttggtctgtcatcagctagttcgacggtcatctatttatgcacggccggcaagtgtggcagaaaagcagccgagcgggcagccggttgagctgcaacgggagtaaaccgaaccaaaatgtgggagcggggttgctcgcgaaagcggtggttcagttgatacatctgtgactgacacaccgcattcgcgagcaagcccgctcccacaagggggaatgcgttacagagggtcttttcggcggtaggggaacacgtcgatcaccttaccggcacgaatcgcgtcctgcaggcctttccagtaatcagcgttgtacagctcgccatgcagctcatcgaacaatctgcgttgcccggcgtcggcaaacaggaacggcgggaactcctcggggaacacatccagcgggccgatggagtaccagggctcggaggccatttcatcctcgggggtgcgcggcgcggggatatggcggaagttggcttcggtgagaaagcagatttcgtcgtagtcgtagaacaccacgcggccgtggcgggtgacgccaaagttcttcagcagcatgtcgccggggaagatattcgccgccgccagttgcttgatcgccaggccgtagtcttccaacgcttcgcgcacctgggcggggttggcgttgtcgaggtagaggttgagcggggtcatgcgtcgctcggtccagcagtggcggataagcacggtgtcgccctctacctccacagtaccggcggcgacttccagcaactcggccaggcactcgggctcgaacttgctcaaggggaagcggaagtcggcgaactcctgggtatcggccatgcgccctacccggtcgacgctttttaccaggcggtacttttcgatcaccgtggcgcggttgacattttttgacggcgagaagcggtccttgatgatcttgaacaccgtattgaaacccggcagcgtgaacacgctcatgaccatgccacgcacaccgggggccatgatgaactggtcatcagtggtggccaggtggttgatcagcgcgcggtagaactcggatttgccgtgcttgtagaaaccgatggaggtgtacagctcggcaatgtgcttgcccggcaggatgcgcttgagaaagccgatgaattccgcgggcacgggcacgtcgaccatgaaataggaacgggtgaacgagaagatgatcgacacgtcggcttcgtcggtgatcaacgcatcgatctgaatgccacgcccttcgcggtgcagcagcggaatcaccagcggccattgttcgtcgcgcgtgtagatgcgccccacgaggtaggcgcctttgttgcggtacagcaccgaggaaaacaactcgaccttgaggtctgggtccttgcacacccaatccggcaggttttcacgcaactgggcttcgaggcggcgcaggtcggcgggcaggtcggcgtagggctcgctgaagctgtagtcagagaaaacctgcgcgagcatgtccgctattttaccggccggcgtgtagatacgggtttgcgccgcccgcgcccggcgcaggctaggccgggtggtgtgaatgaacatacagccgtcgctgatcaggtcatggctgaacaggccgcagaagatcgagttgtaccaggtctcggacagttcatcgtcaaaacgcagatcgatcaggccgatataggcgctttttaccaggggccactggccgatgtcctgcaacgccgcagggtcaaaactggcgcgcaggcgggtcgtgacctcagcgactttctcttcatagaggttgatgcgcgcggccgacgcggcctgcccctgctgccactgggccttctcgaaacgctcacgggcgccatcggtgatctggcggaagtgctcacggtaatcgtcgaaaccgtcgaggatcatccgggcgatagcgagggcggactgcgacatgcgggaaacctcgaacgggtatctggaagcccagagcttagccagtgaaccgaggcaggagaagaatgattttgcacggctgtgaactgactgcaattagccattgtgccgacctgcccgctgggcaacacttctgcgcccgattggcgtaggagttttccgtgagacctgttgacaccctgtatctgctggggctggctgccatctggggcgcgagtttcctgtttatgcgcatgatcgcgccggaaatcggcacggtgcccaccgcgttcttccgcgtgtcgattgccgtcgcgggtttattggtgatcctggcgatgatgcgcgtgagctgggatttccagggcaagttcaaaaccgttttgctgctgggggtgatcaactccgggattccggcgaccatgtattcagtggcggcgcaggtactgccggcgggttattcggcgattttcaacgccaccacaccgctgatgggcgtgctgattggcggattgtttttcagcgaacgcctgacgccgtcgaaaatcgcaggtgtcgccttggggctgtttggcgttgccgtgctcacgcgtgcggggccggtggcctttgatctggaattattgatgggcgcattggcgtgcctgctggcaaccacctgctatggctttgccggtttcctggcgcggcgttggctggaccagcgcggcgggttggacagccgtctctcggccttgggcagcatgttgggggcgacgttgtttctgttgccgttctttgcctacagcgccatcagccatccaccggcgagctggggcggctggcaggtgtggtcgtcgctgctggggctggggctggtgtgtacggcgtttgcctacatcctgtacttccgcctgctgtcatccattggcccggtcaagtcgatgactgtgaccttcatgattccgccgttcggcgtgttgtggggggcgttgctgttggatgagccgttgtccatggcccatctgtatggcggagtgttgattgccggggcgctgtggttggtactgcgccggtccaaataacaaccgcacaactgtaggagcgagcttgctcgcgaaaaacccgagagcaccctgttcattcaggatgccctcgttatcgttgacgttcttcgcgagcaagctcgctcctacagtgagtggtttttagtttttacggaacacgaagaccaacccgacgatgatcaacgccattcccaacacgctcaacagggccaggcggttgccgaagatcaggtagtccatcaccgccgtcaccgccggcaccaagtagaacaagctggtgacattcaccaggttgccccgggcgatcaggcggtacagcaatagcgtcgccagtaccgacaccaccagccccatccacagtaccggcaggtaaaaacgcgcactgtgttcaaagtggaacggctggaacggcacgaacaccgcgcacagcagcaacccggccaggtattgcagtggcagcgtgcccaaggggttgtcggtgatgcgtttttgcatgatcgagccaaacgtcatgctcgccagcgccagcagcccgaacagcatccccgccagggacatgcccgccagcccgatgccctgatacaccaccatgatcaagcccgccaaccccaaccccaggccgaacagccggcgccaggagcgttggcgctccatcagtaccacggtaaggatcggctgcacgcccatgatggtcgccatcacgccgggggtgacgttgaggtccagggccagcagatagaaaatctggtaggcccccagcaataccaagcccgtcgccgccgcatacagcaggggtttgccgggacgaggcagcttcaacttgaggatgggtaccaacaccaccaaccccatcagggcgatggcaaaccggatcaacagaaatgcaaagggcgaagcatgggccaggcccaacttggagaagatcgccccgctgctccacagcaagacaaacacgctcgtcgaggccgccgcggccacggattgtttcgaaagcacagacatggttaccacctgttatcaggctaaaaagccgactcagtaaaaaactgaatttcagtaggtttttttcaggcaggcacggggcaacagcggattgctgatcagcccgaaatgccaacacccggcggtgatacgactgcgtacaccggcgtgctactgacaggtggggggtagtgactgatctgctcaggctgcttgccccggcacggcacgaccacggcgttgaccgctgaatcgactaccgctatgcgctgggaagctggcatgtgctgatcttttttgaagggactaagacgcgacgactataaccagccgcaaacatactttgcaatcctttcccccttgccttgtacgtggaggcgttttcatgccctggaacctggccactcgctataatgctgcccggatttttcgaaggatttcacatgattgctttgccctggctgtacctcaccctactttccattggctatgtcgtggccttgatctacggccaactgggcgtactggcggcggtctccatcgcactgctgctggtggccgggtacgccgtgcgccagcaacgcaacccttgggcgcgctacctgggtcacggcttgtttattgtcctggccctgggcctggcgatgcactggctgccgggtttctataacggccgcggtattgcgccccagcgttttactccggactcagtgcccttctcgatgtacctgaaccaggacaaacccctgatcggcttctggctgttgctggcctgcccatggattgtggcgcgacgctcattgcgcctgtcgatctgcgtcacggccgtggccctgaccctggccgccatcgccgccctgggtggcgcagcgctgctagggatgatcagttgggcgccgaaatggccggacgaggcgtggctgtgggtgttgaataacctgctgctggtgacgttggtcgaagaagcgctgtttcgcgggtatatccagggcggcctgagccgacgcttcaaacacctgccctatggcgagaacctcgcgctgctgttggcctcgctgttattcggcctggtgcattttgctgcgggttggcagtggatgctgctggcgagtattgccggcgtgggttacggcctggcctatcgctttggcgggctcggcgcggcgattgccacgcactttggcttgaatctgctgcacttcgggttgttcacctacccgatgctcgcaggctaaaccttccttactgtaggagcgagcttgctcgcgaaggacttcaacgctaacgcgggcatcctgaatgaacgcgttgcccttgagtgtttcgcgagcaagctcgctcctacaggggcaacaccgttcgcaggattgttgcaaaaataagttaaataaatgccccgcatggccgataccccctgaaagccttgcggattgaacaatcatgcgtaataaccaacccgttacccagcgcgaacgtaccttccccgctcagcaacggttgatctccaccacagatgccaagggtgtgattacctactgcaacgacgcctttgtcgaaatcagtgggttcacccgcgaagaactgatccgcgccccacataacctggtgcgtcacccggatgtgccgccggccgtgttcgcgcatatgtggtccacgctcaaacaaggcttgccatggatgggcattgtcaagaatcgctgcaagaccggtgaccactattgggttaacgcctatgtgacgccggtcttcgacggcaaccaggtgatcggctacgaatcggtgcgcatcaagcccaccgccgagcagatccgccgggccgaagcgctctatcaacgtatcaaccagggcaagtcggccgttccccagcgggacaagtggctgccggtgctgcaggactggctgccgtttatcctggtcagccaactgagcttcatgatcggcgccaccctcacctcccaatggggctttgccctggcagcggcgctgtcggtgccgttgggcctgctgggcttgagctggcaacagcgcggtctcaagcgtttgctgcgcctggccgaacagaccacgtccgacccgttgatcgcgcagatgtacaccgacagccgtggcgcacaagcgcgtctggaaatgtcgatcctcagccaggaagcgcgtctgaagacctgtcttacccgcctgcaggacaccgccgagcacctcaacgaccaggcggcgcagtccaacaccctggcgcacaacagctccagcggcctggaacgccagcgcgtggaaaccgaacaggtggccactgcggtgaaccagatggcggcgaccacccaggaagtggccagccacgtgcagcgcaccgccgatgccacccaggaagccaaccgcctgaccgggcgcggccgcgatatcgccggggaaacccgcgaggcgattcagcggctgtcggtggcggtgggcgagacgggtgtgaccgtcacgcaactggccaaggacagcgatgaaatcggcggcgtggttgatgtgatcaaaggcatcgccgaccagaccaacctgctggcgctcaacgccgccatcgaagccgcgcgtgccggtgagatgggccgtggtttcgcggtggtcgccgatgaagtgcgccaactggcgcagcgtacggccgaatccaccgggcagatccataccctgattgccaagctgcaacacacggcggctgccgccgtgcaaaccatggacgccgggcaccgccaggctgaagaaggtgtagcgcgggtgatggaagccgaccaggccttggtgggcatcagtgaggcggtggccaatatcaccgacatgaccacccagattgctgctgctaccgaagagcaaagcgcggtggccgaggagatcagccgcaatatcagcaccattgcgctgttggcggaccagacctcggagcaggcgatgaactcggcgcaactgagtgaagagttgacgcataccgccaatactcagtactcgctggtggagcgttttaaccgctgaacgggctcgttcccacgctctgcgtgggaacgcctcctgtgacgctctgcgtcacaattttagagggggacgcagagcgtcctgggctgcattcccacgcggagcgcgggaacgatcaacaacccctgagaacctcagcgacgcgcaccgccgccgcctccagatgctgctcatggctgaaccccgaagccttcagcggcttcaagtcatgatcccccgccaccagccacatcacctcgatactgtctgacaagtcataaccttctaccgccgcccgattgcccaaggcatcgcgctcgccctgcactatcaacgtcggcgtcttcagcgcagccaagtgctccacccggggtttctctggcttgcccaccgcatagaacggatagcccaggcacaccaacccatcggcgcccaattcatcggccaacaaactggccatccgcccgcccatggacttgccgccaatcgccagtttcccagcgacatgacgtcgcacctgggcatacacctcacgccacgcctccagcagtttcggcgccggattcggcgggcgtttgcccccgtccaagcggcgctgggccatgtacgggaactcgaagcgcaacacgttcacgccatgcgcggcaaggcgtgcagccatgtcgttcatgaacgccgagtccatcggtgcgccggcgccgtgggctaggatcagcgtgaccggctcacccgacgtcgtgcccgtggcgacatcccacaaccagccatgttcccgtacacactgcgcccattgatccccgtcaatactggccttgtgctctttgcccatgcttgcctcgctttttagtctgcctataactccagcccaagtgccgcatttgcttgggttgaaccgtggatggggaaccatgaacactactttaagtaccgcctataactacaaggtggtccgccaattcgccattatgacggtggtgtggggcatcgtcggcatggggctcggggtttttctcgccgcccaattggtttggcctgcgctcaacttcgatttgccttggaccagcttcggccgcctgcgccctttgcacaccaacgcggtgatcttcgcgttcggtggctgtgcgctgttcgccagctccttttactcggtgcaacgcacctgccagacgcagctgttcgcgccgaaagtcgccgcgttctgcttctggggctggcagcttgtgatcctgctggccgcgatcagcctgccactgggctacaccagctccaaggaatacgccgaactggaatggccgatcgacatcctgatcaccatcgtctgggtcgcctacgccatcgtgttcttcggcacgatcatgaaacgcaagaccaagcacatctatgtgggcaactggttcttcggtgcgttcatcatcaccgtggccattttgcatatcgtcaataacctggaaatcccggtcagcctgaccaagtcctactcgctgtacggcggtgcgacggatgccatggtgcagtggtggtatgggcataacgcagtaggctttttcctcactgcgggcttcctcggcatgatgtactacttcgtgcccaagcaggccgaacgcccggtgtattcgtatcgcttgtccatcgtgcacttctgggcgctgatcaccctgtacatctgggccggcccgcaccacttgcactacaccgctctgccggactgggcgcagtccctgggcatggtgatgtcactggtgctgctggcaccgagctggggcggcatgatcaacggcatgatgaccctctcgggcgcctggcataagctgcgcagcgacccgatcctgcgctttctggtggtctccctggcgttctacggcatgtcgaccttcgaaggcccgatgatggcgatcaagaccgtcaacgccctctcccactacaccgactggaccatcggccacgtacacgccggggcgctgggctgggtggcgatgatctccatcggcgcgctttaccacatgatcccgaaaatcttcggtcgcgagcagatgtacagcctcggcctgatcaacgcgcatttctggctggccaccatcggcaccgtgctctacatcgcgtcgatgtgggtcaacggcatcgcccagggcctgatgtggcgtgcggtcaacgaagacggcaccctcacctactccttcgtcgaaaccctggtggccagccacccaggcttcatcgtgcgtctggtgggcggtgcgatcttcctcagcggcatgttcctgatggcttacaacacatggcgcaccgtgcgttcggcgcaacctgccgaagtcaccgctgccgcgcaaatggcctgaggagtcgatgatgaaacacgaaacgattgaaaagaacgtcggcctgttgatgctgctgatggtgcttgccgtgagcatcggtggcctgacccagatcgtcccgctgttcttccaggacgtgaccaacaagccggtcgaaggcatgaagccctacaccgcgctgcaactggaaggccgcgacatctacatccgcgaaggctgcgtgcagtgccactcgcagatgatccgcccgttccgcgccgagaccgagcgctacggccactattcggtggccggcgaaagcgtgtgggaccacccgttcctgtggggttccaagcgtaccggcccggacctggcccgcgtcggcgcacgctactcggacgactggcaccgcgcgcacttatacaacccgcgcaacgtggtgccagagtcgaaaatgccggcctacccctggctggtcaccgccgccgtcgacagcagccacaccgagaccaagctgaaagtgatgcgcaccctcggcgtgccgtacaccgacgacgacatcaatggcgccgtcgccagcctcaagggcaagaccgagatggacgcgctggtttcctacctgcaagtgctcggcactgccatcaagagcaagaggtgagccatgggatttgaattcgatgcaggcaccattcgcggccttggcacgctggtggtcgccatcgcctttatcggcctgtcgctgtgggtattcaacaaccgccgcaatgcggaattcgagcaggcgcgcctgctgccgtttgccgatgaaccttccccacccgacgctcaagcagagccagccacaaggagcactcggccatgactacgttctggagtacatggatctgcgtattgaccctgggcagcctgatcggtctgacctggctgttggtcggcacccgcaagggcgagaccaagggcagcgtcgaccagaccatgggccacgccttcgacggtatcgaggaatacgacaacccgctgccccagtggtggttcatgttgttcgccggcaccctggtgtttgccgtcggctacctgatcctctacccgggcctgggcaactggaaaggcgtactgccgggctatgaagacggctggacccagaccaaggaatgggacaaggaaatggccaaggccgacgccaggttcgggccgatcttcgccaagttcgcggccatgccggtggaagaagtcgccaaggacccgcaagcgttgaagatgggcggtcgcctgttcgcctccaactgcgcggtatgccacggttcggacgccaagggcgcctatggtttccccaacctggccgacaataactggcgctggggcggctcggctgaggctatcaaagccaccatcctgaacggtcgccacgcggcgatgccggcctggggtgaagtgctgggcgaggacggggtgaaaaacgtcgccgcctacgtgcgccacgacctggccaagctgccgttgcctgctgacaacagcgcagacctggcagccgggcaagccgcgttcaacaccacctgcgtggcctgccacggcccacaaggccacggtgtggaagccatgggcgcgcctaacctgaccgagcctgccggttttatctacggcaccagcctggcgcagctgcagcagaccatccgccatggtcgccagggccagatgccagcccaggatgtgctgcaaggcaatgacaaggtgcacctgctggcggcttacgtgtacagcttgtcccataacgctgaaggtgcaacgccagacagcgcgaccgagtaaccgctgccccggcccggggcggcaacccgtttcactgtaggagcgagcttgctcgcgaagcacttcagagcgccgcgtttatactggataagcgtggtgccctcaggttcttcgcgagcaagctcgctcctacagggatccggtgttgttttcatttgcgcgaccaagtgtcgcaccccttccaagcccacctttcccctcctcctattcgggtctacgcttgttcccacagtggaccattcctggcctacgcgacggtagccgttgcgcccctgaaatttcctgtccactcgatcagctttctattttggattttgtccctacgccaaacatggaaagggcgcagaatctggcgtggaacgcattgatccaggtcagccattgcgttgcaatggcccctcgctttctacatacttgcgaccgattttacctataaaaaaacctaaaccgtggaaccttagaatgagcacagcaatcagtccgactgcttataactataaggtagtccgccagttcgccatcatgacggtggtctgggggatccttggcatggggctcggggtgttcatcgcctcgcaactggtttggccgcaattgaatttcgacctgccctggacgaccttcggccgcctgcgcccgctgcacaccaacctggtgatcttcgccttcggcggatgtgcactgtttgccacctcctactatgtcgtgcagcgcacctgccagacgcgactgatctccgatggccttgccgccttcaccttctggggctggcaggcggtcatcgtcggcgccatcatcagcctgcccctgggctacaccaccaccaaggaatacgccgagctggaatggccgatcgccattttgcttgccatcgtgtgggtgacctacggcctggtgttcttcggcaccatcgtcaagcgcaagaccaagcacatctacgtgggcaactggttctacggcgcctttatcgtggtcacggcgatgctgcacatcgtcaaccacgcctccctgccggtgaacctgttcaagtcctactcggcctactccggtgcgacggacgcgatgatccagtggtggtacggccacaacgccgtaggcttcttcctcaccaccggctttctggggatgatgtactacttcgtgcccaagcaggccgagcgtccgatctattcttatcgcctgtccatcgtgcacttctgggcgctgatcaccctgtacatctgggccggccctcaccacttgcactacaccgccttgccggattgggcacagtccctgggcatggcgatgtcgatcatcctgctggcaccaagctggggcggcatgatcaacggcatgatgaccctctcgggcgcctggcataagctgcgcaccgacccgatcctgcggtttttggtggtgtctttggcgttctacggcatgtcgaccttcgaagggccgatgatggcgatcaagaccgtcaactcgctgtcccactataccgactggaccatcggccacgtgcacgctggcgctctcggttgggtggcgatgatctccatcggcgcgctgtaccacatgatccccaaactgttcggccgcgcgcagatgcacagcgtcgggctgatcaatgcgcacttctggctggccactatcggcaccgtgctctacatcgcctcgatgtgggtcaacggcatcacccagggcttgatgtggcgtgcgatcaacgatgacggcaccctcacctactccttcgtcgaagcgctgcaagccagccacccgggctttatcgtacgtgccctgggcggtgcgttctttgccagcggcatgctgttgatggcctacaacgtgtggcgcaccgtgcgtgccagcgaccctgttgaagccgaagccgccaccaagatcgccgttgtgggagctcactgatgaagcatgaagtcgtcgagaagaacatcggcctgctggccttcttcatggtcatcgccgtgagcattggcggcctgacccaaatcgtcccgctgtttttccaggacgtgaccaacaagccggtcgaaggcatgaagccacgcaccgcccttgaactggaaggccgcgatgtctacatcgccaacggttgcgtgggctgccactcgcagatgatccgccccttccgcgccgaaaccgaacgctacggccactactcggttgccggtgaaagcgtgtgggaccacccgttcctgtggggttccaagcgcaccggcccggacctggcccgtgtgggtgggcgctactccgatgactggcagcgtgcgcacctgtacaacccgcgcaacgtcgtgccggagtcgaaaatgccggcgtacccgttcctcgtggaaaacaagctcgacggcaaggacaccgccaagaagatggaagtcttgcgcaccctgggcgtgccctacaccgacgaagacatcgccggtgcggccgccgccgtgaagggcaagaccgaaatggacgcattggtggcctacctgcaaggccttggcaccatcatcaaaagcaaacggtgaccttcatggatatcgggatgattcgtggcctgggcaccgttgtggtgatggtggcctttatcggcctggcgttgtgggtgttcagcccacggcgcaagtcggagtttgacgacgcgaccatgctgcccttcgcagatgaccccgaagccatcaagcacgtcgagcaagcttctaggagtaacaaagaatgactacgttctggagtctgtacgtcacagtcctcagtctgggtaccatcttcgccctgacctggctgctgctgtcgacccgcaagggccagcgcaccgagcagacggacgagaccgtcggccactcgttcgacggcatcgaggagtacgacaacccgctgcccaagtggtggttcatgctgtttgtcggcacaatcgtcttcgcccttggttacctggtgctctaccctggcctgggcaactggaagggcctgctgccaggctacaactacctcgacaacgacaagcaaacccccttcgccaacggccagaccggctggaccggcgtgcacgaatgggaaaaggaaatggccaggtcggaagccaagttcgggccgatcttcgccaagttcgcgtcgatgccgattgaagaagtcgccaaggacccacaagccttgaagatgggcggccgcctgttcgcctccaactgctcggtgtgccacggctccgacgccaagggcgcctacggtttccccaacctgaccgacgccgactggcgctggggcggcgaacccaacaccatcaaggaaaccatcatgaagggccggcacgcggtgatgccaggctgggctgaagtcatcggcgagcagggcgtagccgacgtagcagcctttgtagtgaccaacctcgacggccgcaaactgccggaaggcgccaaggccgacgtggccaacggcgagaaactcttcgccgccaactgcgtggcctgccacggcccggcgggtaaaggcacgccagcgatgggcgcccccgacctgacgcatccgggtgcgttcatctacggttcaagctttgcgcaactgcaacagaccatccgttatggccgccagggccagatgccggcgcaggagcagttgcaagggaatgacaaggtgcacctgcttgcggcgtatgtatatagcttgtctcatggggataagaaggctgaggagcagtaagacctctgaaacaatggagccccgcgcagcggggcttttttgttctggcgccgaaccttgcaaagccaactctaccgttcgtaacctcaaccttgccgcgcgcactcgccaagtagtaacgtaactacattaagtccagcgaagggggcctaccccatgaccatcacgaccatttccagccgcgaattcaatcaagacacaagtggtgccaaaaaagccgcccgcaaagggccggtttttatcactgatcgcggcaagcctgcccatgtactgctaagcattgaggagtaccagaagctgacaggtctgaacgccgacattgtcgacctgttggtgatgccggaagcggccgatatcgacttcgaaaccgaacgtgccgtgatcattcatcgacccgtggacttttcttgatgtatctactcgacacaaatgtgatctctgaactgcgtaaacctcaggctgatgcaaatgtcgtggcttgggcaaaaagcgtagtagcgccgcgcatgtttatttcggcgatcacgctgaaggaactggaaaccggagtcctgcgaattgaacggcgagacccggttcaggggaaggtgttgagaacctggctcaagcgtcatgtaatgcccgccttcgatgccagaatcctgcccgtcgatgcagcagtcgcgttgcgttgcgcgcacttgcatgtacccgaccaagccaacgaaagcgatgcattgattgccgcaaccgcgctggttcacggactcaccgtagtcacgcgcaacgtcagcgacttcaaatcgagtggcgtgccactgctcaatccatgggacgaatgaccggcttactggcaaaaaccgtccatacttgccaagtcaattgatccagatcacgtacaccatcaattgatttcccccaacgcgaccaaaggtcgcaccctttgcacaccctcgggggcgtatcattaggccactgcaacacccttaatttgaccccggttggcacgtactggccgaggcaaatctccaccgccgtgggatgcaatgatgagcgaccagataccggtacataacgttaccccgcctgccaagaccgtcgacctctacgcttcgagagagaagatttacacccgcgccttcactggcttgttccgcaacctgcgcatggtcggcggtgccgctctgttcctgctctacttcggcaccgtgtggctgaactggggcggtcaccaggcggtgtggtggaacctgccggagcgtaagttctttattttcggtgcaacgttctggccccaggatttcatcctgctctcgggcattctcattgtggcggcatttggcctgttctttatcaccgtgtacgccgggcgcgtgtggtgcggctatacctgcccgcaaagcgtatggacatggatcttcatgtggtgcgaaaaggtcaccgaaggcgaccgcaaccagcgcatcaagctcgacaaggcgccgatgagcgccaacaagttcctgcgcaagttcagcaagcacagcctgtggctgctgatcggctttgccaccggcatcaccttcgtcggctacttttcaccgatccgcgaactggtattcgatttcttcaccggccaggccgatggctggtcatatttctgggtgggtttcttcactctcgccacctacggcaacgccggctggctgcgtgagcaggtgtgcatctacatgtgcccctatgcgcgcttccagagtgtgatgttcgacaaggacaccttgatcgtgtcctatgacccgcgccgtggcgaagtgcgtgggccacgtaaaaagggtaccgactacaaggcccaaggcctgggcgactgcatcgactgcacgatgtgcgtgcaggtgtgccctaccggtatcgatatccgcgacgggctgcaaatcgaatgcatcggctgcgccgcctgtatcgatgcctgcgataacatcatggacaagatggagtacccacgcggcctgatcagctacaccaccgaacacaacctgtcggggcagaaaacccataagctgcgcccgcgcctgatcggttacgccctggtgttgctggcgatgatcagcctgttggtggcggccttcttcatgcgctcgctggtgggtttcgacgtcagcaaggaccgcgtgctgtaccgcgagaacgccgaagggcgcatcgaaaacgtctacagcctgaagatcatgaacaaagaccagcgcgaccacacctacgtgctcgacgccgctgggctgcccgacctcaagctgcaaggccggcgcgaaatcaaagtggccgccggcgatatcgtcagcatgccagtggagttgtcgagtgcgccggagcagttgccgtcgagcaccaacgaggtgaccttcatcctcgaagacgccgatgacaccagcgttcatattgaagccaagagccgattcatcggcccacaagtccgttaacagggaacatacccatgcccgcaactactgccgccagcccttggtacaagcacctctggccctggatcatcatcgcgatcctggcctgctcggtgaccctgaccttgtccatggtgaccatcgcggtgaataacccggacaacctggtcaacgacaactactacgaggccggcaaaggcatcaaccgttccctggaccgcgaacgcctggcccagaccctgcaactgcgcggcaagctgcacctggacgaactgaccggcgaggtcgagctgcaactgactggctacagcaatccgaaaaccctggagctgaaccttatctccccgacccagccagagaaggatcgcaagatcaacctcacccgcagcgacagtgagcaaggccgctacatcggccaggtcaccgacaaggtcgaaggtcgccgtttcgtggaactgcttggcgtggagggcggcaacacctggcgcctgttcgaagaagaagaggtcagccacgacaaggacttgctgctgggtgacgaaccgttgcagggcgctgaagacctgaagaagtagacgatgatcgttcccacgctctgcgtggtaacgccttgctggacgctctgcgtccgctttgtgacgcagagcgtcacgggcaacattcccacgcaaagcgtgggaacgatctgcggaactgagcaatgacccaacccaccccctgctaccactgcgccctacccgtcccctccggcagccggttcaccgcccagatcctcggcgaacgccgcgaactctgctgcccgggctgccaggccgtggccgaggcgatagtggccggcgggctggaaagctattaccaacaccgcagcgaagcctcggccaaccccgaggcgctgcccgtgcaattggtggacgaactgacgctgtacgaccgcgccgatgtgcaaaaaccttttgtgcgccatcaaggcgacctggccgaaaccaccctgctgatggaaggcatcagttgcgccgcctgcggctggttgatcgagaaacacctgcgcagcctgcctgccgtggccgaagcgcgattgaacctgtccaaccaccgcctgcacgtgcgctgggccgatgggcaattgccgttgagccaactgctcagcgagctgcgccatatcggttacgccgcccacccttaccaggccgaccgcgccgccgaacaattagccagcgaaaaccgcctggccctgcgacaactgggggtcgctggtttgctgtggttccaggccatgatggcaaccatggccacctggccggaattcaatatcgacctgagcccggaattgcacgtcatcctgcgctgggtggcgatgtttctgaccacgcccatcgtgttctacagctgcgcgcccttcttcaaaggcgccctgcgtgacttgcgcacacggcacctgaccatggacgtgtcggtgtccgtggcgattggcggcgcgtacctggccggcatctggaccgcgatcactggcgtaggcgaattgtatttcgatgccgtgggcatgtttgccctgttcctgctggccgggcgctaccttgagcgccgcgcccgggaacgcaccgcggcagccactgcccaactggtcaacctgttgcccgcctcctgcttgcgcctcaaggatgatggacagagcgaacgcatcctgctcagcgaattggcgctgggtgatcgtgtgctggtgcatcccggtgcggtgctgccggcggatggcgtaattctcgacggccaatccagcatcgatgaatccctgctgaccggcgagtacctgccgcaacctcggcgtacgggtgacagcgtcacggccggcacgctgaatgtcgaaggcgcgctcaccgtccaagtgcgcgccctggggcatgacacgcgcttgtccgccatcgtgcgcctgctggagcgcgcccaggccgagaagccgcgcctggcacagatcgccgaccgcgctgcgcagtggttcttgttgtgctcactgatcgccgccgcgctgatcggcctgctgtggtgggagctggacccatcccgagcgttctggattgtgctggcgatgctggtggcgacctgtccgtgcgccctgtccctggccacgcccaccgcgctcaccgccgccaccggcaccttgcacagtctcgggttgctgctgacccgcggccatgtgctcgagggcctgaaccagattgatacggtgattttcgacaagaccggcaccctcaccgaagggcgcctggcgttgcgcgccattcggcccttgagtgcgctggacagcgaccaatgcctgggccttgccgccgccctggagaaccgttccgaacacccgattgcccgtgccttcggccgtgcgccgctggccgctgatgaagtgctgagcactccaggcctgggcctggaaggtcgtgtgggagaacgtctgttgcgcatcggccagccgggttttgtctgtgaactcagtggctgcgcgattcccgcctcgccggacgaggccgggcaatggctgctgctgggcgaccacagcggtgccctggcctggttcgtactggatgaccgcctgcgcagcgacgcacccgccttgctcgccgcatgcaaggcgcggggctggcgcacgctgctactctcgggggacagttcgccgatggtggccagtgtcgcttctgagctgggtatcgacgaagcccacggcagcctgcgccctgacgacaagctgcaggtactgcaaaacctgcacaaagaaggtcgcaaagtgttgatgctcggcgatggggtcaatgatgtgccagtgctggccgctgccgatatcagtgtggcgatgcgctcggccaccgaccttgcgaaaaccagcgccgatgcggtgctgttgtccaaccgcctggatgcgctggtgcaggccttcagcctggcgcggcgcactcgccgggtgatcatcgagaacctgttgtgggccgggttgtacaatgggcttatgctgccgtttgccgccctgggttggatcacgcccatctgggcggcgatcggcatgtccatcagttcgttgaccgtggtgctcaacgcgttgcgcctgactcgcctgccgagcgcgcaagccccgggcaccgccccactaacccgcccgctgccggcctgagccgcgcgggcatggagtacagatgccagctctctacgtgatgattccggcggcactgctattagtgggtgtggccatctacatcttcttctgggccgtggacagcggccaatacgaagacctcgatggcccggcccacagcgtgctgttcgacgaccaggacccgaaccacctagccgccatcgacgaagccaacagccccgagcagccgcccaaagagccccctcatgcttgagctggcgcccttgctggtctcggcgctgatcctcggcctgctcggcggcggccattgcctgggcatgtgcggcggactgatgggcgcgctgaccctggcgatccccaaggaacaacgcagccgccgttttcgcctgctgctggcgtataacctggggcgcatcctcagctatgcaaccgccggcttactgatcggcctggccggctgggcagtggccaacagcccggcggcgatgttcatgcgagtgcttgccgggctgctgctgatctgtatgggcctgtacctggccggctggtggagcggcctcacccgtatcgaaagcctgggacgcggcctgtggcggcatctgcagccggtggccaaccgtttgctgccggtgtccagcctgccgcgagccttgctgctgggcgcgctgtggggctggttgccgtgcgggctcgtctacagcaccctgctatgggcggcgagccagggcaatgcactggacagcgccttgctgatgctggcgttcgggctgggcacctggccggtgctgctggccaccgggctggccgccgaacgggtgacggcgttattgcgcaagcgcagcgtgcgtgtggccggtggcgtgctggtgatgatcttcggtctctggaccttgcctggcccccaccagcactggctcatggggcattaacaggccctgtggcatagcgccgctccccgttgatgcaaatcaagatgcctgcaccgccctgcccctagactcggcccactagccaatccgggggaccgcccgcatgctcgacgccattcgttgggacacagatctgattcaccgctacgacttggcggggccgcgctacacgtcctaccccaccgccgtacaatttgacagccaggtcggcaccttcgacctgctccacgccctgcgtgacagccgcaaggccgtgcggccactgtcgctgtatgtgcatgtgccgttctgcgccaacatttgctactactgcgcctgcaacaaggtgatcaccaaggaccgtggccgcgcccaggcctacctgcagcgcatggagcaggaaatccaattggtggcctgccacctcgacccgcagcagcccgtggagcaactgcatttcggcggcggtacgccaacctttctcagccacgatgaactgcgccaggtgatgaaatgcctgcgccagcatttcaatttgctggaggacgactcgggcgactacggcatcgaaatcgacccgcgcgaagccgactgggccaccatgggcctgctgcgcgaactgggcttcaaccgcgtgagcattgggctgcaagacctcgaccccgaggtgcaacgggcggtcaatcgcctgcaaagcctggaagaaacccgcgccgtgatcgatgcagcgcgcaccttgcaatttcgctcgatcaatatcgacctgatctacggcctgcccaagcagtcgccgttgaactttgcgcgcaccgtggaagaagtcatccgcttgcagcctgaccgcctgtcggtgttcaactacgcgcacctgccggaacgcttcatgccccaacggcggatcaacaccgacgacctgccctcgccggcagaaaaactgctgatgctgcaaaccaccatcgaacaactgacccaggccggttaccgctacatcggcatggaccactttgccctgccggacgacgaactggcggtggcccaggaagaaggcaagctgcagcgcaatttccagggttacaccacccacgggcactgcgacctcattgggttgggggtgtcggcgatcagccagatcggcgacctgtattgccagaacagcagcgacctgaaccagtatcagaacgctttggcgggcgcgcagttggcgaccagccgcggcctggtctgcaccaccgacgaccgcttgcgccgggacgtgatccagcaactgatctgtaatttcaacctggcattcgaggggatcgaacaggcgtacaacatcgattttcgcggctactttgccgagctatggccacaattgcagaccatggctgacgatggcttgattgaactcgacgtccagggcattcgcgtgctgccggccgggcgcttgctggtgcgctcggtgtgcatggtgttcgatgcctacctggagcaccagaacaggcaacggttttcgcgggttatctaaaggcccttatttcatggccaagctggcggccttgactgcatcaccggcactcatgtctttcatcgccttggtcagggacgcctgggcgctagtcaagctggcttgcagtgcgctcaacgctgactgcagcccggagagtcgggcacgggcctgttcagggctgagatttctgtcggccattaccgcagccatctcggcctgtttctcggcaatctgctttttgatctcacgaatcatcttcagcagattcttgacgttgtccgccaagccactgtcgtcgatgtcactgtttgaggttttctcagccgccgccgctttcatcgcagcaccggaaatggtcactgacaccgcaggcttggcttcatccgtcggcgcaaccgcagcagcatcggtcgcggcagccttcttggtttcgggcagtgcctggatctgggtacgtgaagccagttgtgtactgagggataacatggtctgagccaccgcgttggtattcgatggcagtgctatcggccgtttcgggcaaatctttacttcgcgacaggtttttgtacaggctggcctccgtggcccccagtgcgttacccttacgtcttatgtgtgttttcccacaaggatttaagaaatgtccgagccagtcaaactgcgcgctcacagccaggcccattgcaaggattgcagcctggcccccctctgcctgccactttcattgaatctggaagacatggatgcgctggacgacatcgtcaaacgcggccgcccgctgaaaaaaggcgagtttctgtttcgccagggcgacaagtttgattccgtctatgcagtacgttcgggcgcattgaagaccttcagcctcagcgacggcggcgaagagcaaatcaccggtttccacctgcccagcgagttggtcgggctgtcggggatggacaccgagattcacccggtgtcggcccaggccctggagacgacgtcggtgtgcgaaattcctttcgagcgcctggatgaattggccctgcaactgccgcaattgcgccgccaattgatgcgcgtgatgagccgcgagattcgtgacgaccagcaaatgatgctgctgctgtcgaagaaaaccgccgacgagcgcatcgccacgttcctggtcaacctgtcggcgcgcttccgtgcccgtgggttctcggccaaccagttccgcctgagcatgtcgcgcaatgagatcggcaattacctgggcctggcagtggagaccgtgtcccgcgtgtttacccgcttccagcagaaccagttgattgccgcagaaggtaaagaggtgcatatcctcgacccgatccagctgtgtgcattggctggcggttctctggaggtctgacccagactgcggccgcgccaatcggcgaggccgcaggtatacttcgggtccgttttccgctctggactcctcgacgatgacctttgattcgttcgacatcaaatccctgattcgccccgtcatcgacttccccaagcctggggtgatcttccgtgacatcacgccgctgttccaatcgccccgcgccttgcgcctggtagccgacagctttgcccaacgctatgtcgaagccgacttcacccatatcggtgcgatggatgcccgtggcttcctgatcggctcgatcatcgcctaccagctcaacaagccgctgatcctgtttcgcaagcaaggcaagctgccggcggacgtgctggccgagggttaccagaccgagtacggcgaagccttcctggaagtgcacgccgacagcctgtgcgaaggcgattctgtgctgatgttcgatgacctgatcgccaccggcggcaccctgattgcggcggcgaacctggtgcggcgcatgggggcaaagatttttgaggctgcggcgattattgatttgccagagctgggtggctcgcagcgtttggcagacatggggattccgacgttttgcctgacgcagtttgggctgactgagagataagcgtcgtcagtactgccgtcatcgcgggcaagcccggctcccaccttggaatgcattcccctgtgggagcgggcttgcctgcgatgaggccggtctgggcactctcaatttcaaggaagaacacttnnnnnnnnnnnnnnnnnnnnnnnnnnnnnnnnnnnnnnnncaccttggaatgcattcccctgtgggagccgggcttgcccgcgatgaggcccgaaagaacaccccggtttacaaccccatctgcttactgatgatctcattcatcacttcacgcgtcccgccaccaatcgacagaatccggttatcacgatacagccgctccaccaggctgccacgcatatacccctgcccacccagtatctgcaccgcgtcatacgtcactcgatcagcggtatcggtggccaggttcttggccatggaaatctctttgatcacactcttgccagcggccatcttcgcagcctgccgataggtgaactcacgggaaacctccaccgcggtagccatttccgccaggcgatgcttgagcacctggaatttgccgatgggtttgccgaatgcttcacgctgggcggcccactggaggctttcctccaaggccagttgcgcggtcatgttggccatcaaggccaaggccagacgctcgctctggaagttgcccatgatgcaggcaaagcccatgttctcgacgccgataagattgcccacgggcacgcggcaatcgtcgaagaacaactcggcggtgtccgacgcccaccagcccatcttcttcagtggctggccgacggtaaaaccgggggtgtctttttcgatcagcagcaggctgatgccgccaaagcccggcccgcctgtgcgcacggccacggtgtagaaatcagcgcgaatgccgctggtgataaaggtcttggcgccgctcacgcggtaatgctcgccctcacgcactgcgcgggtttgcaggttggccacatctgagccgccgctgggctcggtgaccgccagggcgatgatcttttcgccagccagcacccgaggcgctatgcgctcacgcacgtcgggccgggcccatttgacgatgggcggcaggccgatatccagggagccgagccccgccaccaccccaccggagccgcaacgcatcagttcttcgctggcagcgaccttggcgaacagatcgccttcgtggctgccacccagggtttcggggtagccaatgcctagaatccccgccgcaccggccttgaggtagagctcgcgaggaaagctttgcgcctcctcccactgctcgatgccgggcaacatctcacgctcgacgaagcggcgcacgctgtcgcggaccaattggtggctgggatcgaagtattcctgataggcagacatcggcaagctccatggcgggatggagcgaacttaccaagcgcttgcttggttatcaagtcatgtgtctgcgctaaccctgtaggagcgagcttgctcgcgaaaaccgtcaacgataacgcgtgcttcctgcgtgaacacggcgcctattggtttttcgcgagcaagctcgctcctacagggttaggaagtcccagattgcagtgggttttagagggcgatgggtttgcggcctgcgaacgagtgcgccaaggtaccgccatccaccagctccaactcccctcccaacggcacgccatgggcaatccgcgaagtgatcaagcctttgttggtcagcagttgggcaatgtagtgcgcggtggcttcaccttccaccgtcgggttggtcgccaggatcacttcagtaaaggtgccctgctcttgtatccgcgtcaccagttgtggaataccgatggcttccggccccaggccatcgagcggcgacaggtggcccttgagtacaaagtaacgcccgcgataaccagtctgctccacggcgtacacatccatcggcccttccaccacgcacagcaatgtgtcgtcgcgacgcgggtcggcgcattgcgggcagagttcttcttcagtaagggtgcggcactggcggcagtggcccacgccttccatggcctggctcagggcctgggccaggcgagtgccgccgctgcgatcacgctccagcagttgcagcgccatgcgctgggcagttttctggccgacaccgggcaaagtgcgcaaggcgtcgatcagttggcgaatcagggggctgaagctcatgggcgaagggtccgacaaaacaacgagacgcggtttatacccgcgccccggattagcgtcaaatactcaatcctgcgcgacgcgcaccaccagcttgccgaagttgcgtccttcgagcaggccgataaaggcttcgggcgcctgctccaggccatcgaccacgtcctcgcggaacttgatcttgccctcgcgcacccaaggcgccatggcgctgaggaactccggctggcggtcgccatagtcgtcgaacacgataaagccctggatgcgcacccgcttggtcagcaaggtgcgttgcagcgtcggcaaacggtcagggccactgggcgcttcatgggcgttatagccggcgatcaacccgcacagcggcacgcgcgccttggggttgagcaaaggcagcacagcatcgaagactttaccgccgacgttttcaaagtagatgtccacgcctttgaagcaggccagggccagttcatgggcgaaatcttcgctcttgtggtcgatacaggcgtcaaagcccaactcatccaccacatagcggcatttgtccgcgccaccggcaatgcccaccacgcgcaagcctttaagcttggccacctggcccaccaccgaccccaccgcgcccgacgcagccgccaccaccagggtttccccggccttgggctggccgatatccatcaagcccatataggccgtcatgcccggcatacccaatacgcccaaggccatcgacggactcggcaggcccttgggcagcgggatcaggttatggccttcgcaaatgcagtggctttgccagccagtggcgccgaccaccaggtcgcccacttcgaatttcgggttgcgcgattgctcgacacggctgacagccccaccggtcatcacttcaccgatttccacgggggctgcgtaggacggcgcgtcactcatgcgtccacgcatgtaggggtccaaagacaggtacagggtcttgagcagcacctggccgtctgccaggtccggcaggcttacacgttccaggcgaaagttttccggcgtgggtgcgccttgagggcgtgagaccagaacgatgcgttggttgagcgtcatttcttgaggcatcagcggggctcctttatcggcgagtggtttcaacggtatagggtgcagaccatcggtgcaggcttggggttcgatgtttcgactgaccaaaaaaaatgccaggcgcgatgcctggcatttgagtctagctaaaagcgtgtgtcagaacggcagtttcatgcccggtggcagttgcatgccagcggtcacgccggacattttgtcctggctgttggcttcgatcttgcgcacagcgtcattgacggctgcggcgaacagcgcttcgagcatttccaggtcatcttcacccacgcccggcaatacgcttgggtcgatgctgacacgcttgatgtcgtgacgaccggtcatcaccacgctgaccatatcgccaccggctttaccggtgacttcggcgttggccagctcttcctgcatcttggccattttttcctgcatctgctgcgcctgcttcatcaggccggccatgccacctttcatcatgggaatcacctcaaaagtacgtggatcaatgagtagcccggagtcatgacgcttgggacaccggggcttcgacaggttcaatagtatcgtggcggacgaccgcaccgaactgttgcatcatttgttggataagcggatctgcgtggatcgaatcctcggccccgcgctggcggttaaggcgccgacgggtcgcggcctgggccggggtttcctgctcgggcttgatcagttcgatggcgatggtcagcgtgcgcccgtggtattggttgagcgcatcgttgagccggcgctgctgggtggcgttgaacaaggcgctatgggccgggtccaggtgcagcagccagtggtcgccttcgatggaaatcagggtgcagttggcggcgatactgccggtcatgccggagatcggcaatttcggaaacaattccagccattgcagggccaggccggtagccggggccgcggcaggttctgcctcgggctcgggcgcaggttcggcggtgtgttcgctggccaagtcgtccaggtagctgtaagccgaatccatgtccggctcgatatagtcttcgtccagcggcggttcgtcgtccaggtcaatgcctggggtggccgcgtcaacctgggcgaccgtcggctcgggaaccggtgccgatacccactcaggggcatccggcaccacgctgtccggagtcggcgcaggcatcggcgtcagctcgggttgctcgcccgtggtttccagcacgggctctaccgcgggctgttgctcgggttctacttgcgcttcgaccgggtcattccagggcaagtcgaccacgggcgcgggctcgatgaccggctcgggctcgaccaccggtgcgacggcaaccggcgcaggttcgggctcaggtgccggcgcaaccggctcaggcgcagcaactactggcgcaacaacggccgcgccagccacgggtttggcggaatcaactgtggcctggctgatccccactggctttagcggctgtctcggcgcgtctgccgaatctgctggccggaacgccagcatgcgcagcagcaccatttcaaagccaccccgcgggtcgggtgccaggggcaggtcgcggcggccgatcaggcccatctggtagtagaactgtacgtcttcggccggcaaggcctgggccagggccaatacgcgatcacggtcgccatggccgttgtcgacgccttccggcagggcctgggcgatggcaacgcggtgcagtacgttgagaatttccgagagcacaccgttccagtccgggccttgctccgacaggtgtcgcactgcttcgagcaacgccttggcgtcaccctcgatcagcgcgtgcagcacgtcgaacacctggccgtggtccagggtaccgagcatcgcgcgcacgtcggcagccatgaccttgccttcaccgaaggcgatggcctggtcggtgaggctcatggcatcgcgcatcgaaccgtcggcggcgcggcccagcaaccacagtgcgtcgtcttcgaacggtacgttctcgacgcccagcacatgggtcaaatgctcgaccacacgctcgggggtcatgtttttcagggagaactgcaggcaccgcgacaaaatcgttgccggaagtttctgcgggtcggtggtggccaggatgaacttgacgtagggcggcggctcttccagggttttcaacaaagcgttgaaggaatggctggacagcatgtgcacttcgtcgatcaggtagaccttgaagcggccacggctcggcgcgtactgcacgttatccagcagctcgcgggtgtcttcgaccttggtacggctcgcggcgtcgatctcgatcaggtcgacgaaacgcccttcgtcgatctcacggcacaccgaacaggtgccacaaggcgtcgaggtgataccggtttcacaattcaggcacttggcgatgatgcgcgcaatcgtggtcttgcccaccccgcgtgtaccggtgaacaggtaggcgtggtgcagccgttggctgtccaaggcattgatcagagccttgagcacatgggtctggccgaccatttcgcggaacgagcgcgggcgccatttacgtgcaagaacctgataactcatcgaaaaccgtcgcaactgggaagcggaagccggtaatgctagcggagcaagggggaaattgcatccggcacgctcgtctaatctgacgaagcctgttcaattggcctttcagagggcgtcttcgggcgttctgccagcacgcttgaacaccagcgcccttccagactgatagcggcaacgctggccagcacgatcaccgcgcccagcatcacctgcagggcaacgtgctcaccgagcagtgtggcagccatcagcatcgcaaccggtgggatcaggtacatcgccaccgacgcgcgactgacctcgacgtgcttcaacacgtaaccccaggccagataggccaaggcgctgggaaaaatgcccagcaccaacacggcgagattctgcgccatcggtgcctgcacgatggcgacgggcaggcccggcaggttcacgcacagcatcagggtgccagaccacaccatgtagcacgccatggtcaacgggctgtagcgctgggcatgatgccgctgtatggcgaagtacacactccaagagcaggccgccagcaagatcagcaaacctcgcgggttgagatcgcccatgccctggtcgccccagatcaccaccagcacgccggccaaccccaacagcacgcagccccaccgccaggcgctgacccgctccttcaagcagaaaaacgcgatcaacacactgaacagcggcgccgactgcgccaacacactcgacgctgccgccgtcacccattgctgcccgtaattgagactggtgtggtgcaggaacaccccgaaaaaacccaacaccaacagccacggcacgtcgcgcaacggtggccgtccaattcccaccacccaggccacaccgcccatgaataccgacgcgatcagaaaccgcagcagcgccaattggccggggctataactgtgcagccccatgtgcacgccgatgggcgaatacgcccaacagaggataacgctggcaatgactagcgtaagctttagaggtgacggagtattcatcgacagcatccacgcaaaaggaatgctgccagtcttggcccaggccaggcgtaggacaattaagcgtttctgacttctgaaatcattggaactgagcaatggaactggcccaactgaaaatggtgcgagccgtggcgcaaaccggcagcgtggcccaggctgcgctgcaattgcactgcgtgccgtccaacatcaccacgcgcatcaagcagctggaaagcgagttgggcacgccgttgtttatccgtgctggccgagggctggcgatcagcgctgcgggagagatcttcctggattactgcgaacgtatcctggccttggtggatgaatccaaacgcgcggtggatgccaacgccattccccgtggcaccttgcgcatcggtgcggtggaatccagtgccagcgggcgcctgccgccattactggcggaataccaccggcgttatcccgatgtcagcctggaactggtcaccggtgcctgggcgcaattgctggacgacctgcagcaccaccgcctggacgtggcgctggtggcagccggcggcaaacgcacgaagctggaacagagcgtggtctacagcgaacgcctggtgctgatcgccagcgcgtgcagcgcacctatcaatagcgccgaggacttggccggccgtacattgctggtatggccgccgggctgcccttatcgcgccgccctggaaaactggctcaagccccatgacgtcaagccagcgattgccagctatgccagttggggcacgatcatcggatgcgtcagtgcggggattggcgtggcgttggcacccgaggggatcctggcgcgctatgagcaggccaatcagctggcgtcgtatcgctttgaagcgctggcgcccgtggacaacctgttgttctggcacacggacacccagcggcacctggcgcgagatgcgtttgccgggctactgcgcgaaacctttggctgacttgctcgctcctacaatttagggcttcggggcagccaaccgtgcgtactggccctggctgatccagcccgtgaaagagcggtcgtcagcgttgatgaattccacctgcgcccaaccgtccttgaacgccagtacgcccaccacgtcatgcttgacgatgtagggccgctttgccgctttggcgcccggcgttttcagcaggtaagccttgtcggcagacaccgtcaccaagccgatccatggtttgctggcggtctggctcaactccaggccggtggcgatctccggcatcagcacattgatgcagccagggtgttggcggccctgcgccaccgtcagggtcaccccgtcgagcgccgcggccacgctgcctgggtaggcagcgtcccgccaggtggtgagcgcttcgggcttgccttgcaggtagaacgtgcaaccacggaccacaccctcgcccatcgattcctgatagaacccctcgacctgatgcccaggcgtcaccgccagcatcagcccttcatatttacctgaatgcaacgccgccgagccggccaacacgggcgccacggcgcaccacgacaacactcccatcgccagataacgaatcatcttatttcttcccttcaaaggcttcgtaggcttgtttcatcaggacgtcatagttgccgtaatcgtcgccgttatagttacgggccatggcggtaaaatccttgtttttcatcgcgctcaataatgccgagttgtggctgcagaggctcagataggccttgagttggttaccggcattgatcttcaatgaggctacgaactcaaacactgtcttgaacccgcacgccgcaaaattgaaccccatgatctgaaacatgccccaggaggccgacatcaaggccgcttcctgatccagcgcaaaggcggtggccatggtctcccaggccttgacctgatccttgttgttcgtctgccattgcgggccggcttttttcttgtagacatacgacagcagcggctgcgactggtcgtagatgtgcttggtgtacttgcgaaagtggtgcccttcaaaggcgatgatcggcaacttggcaggcccgaaccccaccttcccgcccgactccaccgtggcgaacgccttgaccacattcaccgaaataccgttgcccaattgcttggcggcgttctggaaatccgtatcgctcaaggtcgtcccgccgtcgcaggtggactgcatcatcaactgccggttacgccgctcggcctcgatcaccgcacgcacacggtccaggtacacattgaccgtggcctgtaccgcatcgatgttgttattgccgaaaatgttgagaaacgtcggaatgcgcgtgttaggaaaagcccgcaccggcaccttcagcgcctcttcgatcagactgttgaacgtgcgcccggtggggtcgatcacgccatcgggatgggcgtacttgagatggcgaaactgatactggctgatgcactgcaccaactggccgtcgcacttgccgttttccagcaaggcaaaccccatcttgggaatgatcaaattgaataaatactggatgcactgaacatcggcgggcaagttgcgggctttgccgggcgtccctaccggagcactgataagacgaggcaacccttgcaggcttttcatgacagacatccttgtgagtgaaagaagtgatagcacttcaatatcaaatccatgcccttgtcatactctgaaacaagtggccggcgcaagctaacaaggcggtctgcgggttgtccagagggctttatgaaagttgtgaaacagccggattaaattgcttagtaaccgtgggattcacgggtcttttgatacttgtggtagtcgagccactcgaccacatcgtaaggcagatacaactgcaccctggcccgtgaaatcgcgatatacaccgcacagagtcgttgatcgaacgcgtaggcgtcctggaacttcacattggtcaacagttccggggtgagcagtactcggtcgaactccatgccgcccgcgtcctgcgccagcatcagcaggacgcgctcgtccggatggccactcaaccggttcaaccgcgtgacatccgccacgttgaagcctttttccagcgcggcctcgacccacacaaacgcctcatcgaactggcaggcttcgcgcacctgctgccaatcggccatgtcgctgaaaaacggatgggggccgaggtcattgaactcattgctatagaaatcgggtttgaacaacgcgatgaccgtgtccatgaagtgcttgagcgactgctgggcctctttgctcgccaggccgaacgcacaacgggcgtggctcagttggatcgcccactgcatggtgtcccaatgggaggcggtcaacaccacgcaaccttgcgggggcacaaaaccctgggggtaaaactcaatgcccacgtcggcatcgcgggcgccctcgaaaagcgatttggttttttccgagtgcaagctgatcaatgggttgaccaggcgctcgacattgcgcccggaacgcacggagtagcacacgtcggtatggcgaacctcacgggcgcgtttgaccacgccgccactggcctgctgatactcatcccccaaagtgatcagcacctggcggccgcgctcgatgatttgcagcagcggcgccgggatatcctggctctcatcgatcagcacatgggtatagcgctcgggcaccacgcagcctgccaggctcgcgcgtttgatcatcaacaaggcttcaaacccggtgtggcggccccaggccgggttcgcctcaaggtagccccataaccggctggcatattcgagcagcaccctggcatcgacgccggcgagcggttgcttgaaatgcggcaaatgctgggccgacaggcggtactcccaagagcggcagtaggcctcaagcaccttgaggcacacctccaccaccgcctgcccttccaggcggcgaaaaccaaagatattcaactcttgagccagcgcctgcttggtcggcaccctcgccggtgtattcaacggctgtggcctcggcccatgcaacagcgcatgggcaaagccctggaaggtatgcccggccttacgctcccgtacacccaccatgcgggcacgcagtgtttcgagttttgccggggtacgcgccagcaacaaggtcttttccgggcgcaggtgctccagcaaggccaccagcaggtgactcttgccaatgccggcgtagccttgcacatgcaggtcttcgttcaggttggcgcggaaggttctgagcagcttgtcctgctcggcgctcaaccagcgctcgcgatgcctgggcgtgatcacctgctggctgaacggatcattggccttgaggtggcggactttatattcgacatcccatttgccactgggcaacaggtagtcccgggcctgtacttcctcctccagcagaaagcgcagcctcaggcttttgaccacattgaggccgaagtacagcttcctctgatcgaacagccgctgcgcttcagagagcagggacacactggccgaatggctggcatcgactgcccagtcaatcagcttggccaacactttttccgcaccgctggcgctcaggtcgctttccggcacctgcgccaggttctggatcaccaacaccgccgccaattggggctcactcagggctacaagtgcatcgaaaccctcactgcccaacaaacccgcacaggtgtgctcggtgatcggcaagaaaacagggctggataagtcgaaatgttccgagtgcatagagcctcgtagccagggggaagagacgcttgggagtatgccactagatgcgaaatgaccgtcatgcactgtgcaataagcatcacagatgactggctgaaaataacttgggttttagaagggactgcagaagggagcgttatggaggcaaccccaccagccacaccccggcacacaatgttcccgctgtggctgctgccttccggctctgaccaggttcacgggtaatcgttgcggggggaccgatggggtcaccataacgacgctgcctctcggcaagccgcgccattgtacccatctcatcggaagttacaaccgttggttccggattaaaaaatgagaaggctcaagcacttgccataaccccatcggccctgccgccttcttcctggatgaccaggtgaataaagtgcagcttggcaatcaccgcgggcggcagcacaaaggggtagaaatccggctggcccatggcgcgggacagttcgttgagcatgccggccagttcgatccaggcattgacgaagcagaggaatgccgggccgccagggtgttgagggtcgtagagcgtggtcaaggggaatggctggtaatccaggtccatctcgcgggcgctcatgccaaagcccagggccgtgtccacggcgtccatcatgtgcaggtagtgggcccaggtttcggcccagtcttcccaggggtgcatggtggcgtaggcgctcacgcaggtgagttgccagtccgggcgcgggccgttctggtagtgccggtcgagggcctcggcataactggcgcgttcgtcgccgaacaggttgcgaaaaggagtaagccagtggctgttggcgatcaggcggtcccagtagtaatggccgacttcatggcgaaaatggccgagcaaggtgcggtacggctcgcgcatctgtacccggactttttcgcggtgggcatcgtcggcttccttaatatccaaggtgatcagcccattggcgtggccggtggtgggcgcgttgccttccaggtcgataccgatgaagtcaaaggccaggccagtctcttcgtcaacgctcttgggcaccacttgcaggcccaggctgatcagttgcgccaccaagcggcgcttggcggtttcgaccttgcgccagcgttcggggttttgtgcaatcgataggtcagggatggtgcggttcaggctacaggccacgcataacggcacagtgctgtgggcggggatcagccagttgcacgcggccggtgagtcgaggttggcgcagcgccggaaagcgccggcatcgagattgtcgtcggccagccaagtaccgaccaccggcccaggttgcaaggacgacaggcggctttgctgcggcaggtaacccaacgccgcctggcaggccaggcattggctgttgcgaaagaacagcgactggccacaccggcattgccacaccttgctgttgcgcgaggtttgggccatgaacggagcggcgatgcgcgtgctgagttgctcgaagtagcggaacatggcgatctctccctggggtgacagagactagatcatttctcgggagagatcgttcaacaggcaaaggataacgcctctgcactttgtaggagcgagcttgctcgcgaggatcgtcaacgataacgcgggctgcctggttcacagcggcgccctccggttcttcgcgagcaagctcgctcctacagtgttgagagaaggccgtgacgcggagcgtcacaggatgcgttcccacgcggagcgtggggacgatcaaagcctgtcagacggtgatgttgtgcttggccaggaaggcgacgaaggcttcctcgtccagtactttcaggcccagttcattggccttggccaatttcgaaccggcgcccggcccggccaccacacagtgggttttcgccgaaaccgaaccggccaccttggcccccaggctttcgagcttgtccttggccacgtcgcggctcatcagctccagggagccggtgagtacccaggtgtgcccggcttcaggcaaaccttcgacgagctttttctcgctctgccaatgcatgccgaagtccttgagttgctgctcgatggccaaggcacggttggcgttgtcggcattgtcgaaaaactcccgtacagccttggcttgcttctcgggcagcgcctggcgcatgtcgagccagtcagccttgatgacgccttccagcgaaccgaacttgtccgcgagcttctgcgccgcgcccgggcccaccgacggcacatgcagcttgtcgagcaaaccgcccaaggtggtgctggcggcgaattccgcgctgagctcgccctgctcctgcaattgcaggccacattcgtccggcgacaacagcgcgccaatcacctgctggttgtggccgtcttcaaagaagctatggatctcatgggccacttccagcccgacatccggcaagtacgtcagcacctctggcaacgccttttgaacacgctccagagacgccagcgagcgcgccaggaccttggccgtctcctcgcccacgtcgggaatgcccaaggcgtagataaagcgtgccagggtcggggtcttgctgttttcgatggcgctgatcagcttcttgctggagatatcggcaaagccttccaggtcgatgatctgttcgtacttgagcttgtagagatcggccggcgaaccgatgagcttttcatccaccagttgctcgatggtcttgtcgcccaggccgtcgatgtccatggcccggcgcgagacgaaatgaatgattgcctgcttgagctgcgcgccgcaggccaggcgcccgacgcaacggtacactgcgccttcgctgacggtttccttgcccttgctacgcttgaccagttgcgtgcgctccacatgggaaccgcacaccgggcaattctgcgggatctgcacggcgcgggcgttttccgggcggcgctcagtgaccaccgagaccacctgcggaatcacatcaccggcgcggcggatgatcacggtgtcgccgatcatcagccccaggcgtgccacttcgtccatgttgtgcagggtggcattggacacggtcacgccagccactttgaccggtttgaggcgcgccaccggcgtcaccgcaccggtgcggccaacctggaattccacgtcgagcagctcggtgagttcttccatggccgggaatttgtgcgcgatcgcccagcgcggctcgcgggcacggaagcccagttcgcgctggtaggcaatgctgttgaccttgaacaccacgccgtcgatttcatagcccagcgcattgcggcgctcgccgatgtcgcggtagtagtccaggcactcctggatgcccttggccagcttcaattcgtggctgatcggcatgccccactgctgcaactgcttgaggttgccgatatgggtgtcgctgatatccgcggtcacttggccgatgccataacagcagaattccagcgggcgactggcggtgatcttcgagtccaattggcgcaggctgcctgctgcggcgttgcgggggttggcgaaggtcttgccgcccacttccagttgcgaggcgttcaatcgctcgaaaccggccttggacatgaacacttcaccgcgcacttccagggtggccggccagcccgtgccgtgcagtttcagagggatattgcgcacggtgcgcacgttgacgctgatgtcctcgccggtggtgccatcaccgcgggtggcaccgcgcaccaactcgccattctggtacagcaggctgaccgccaggccgtccagcttcggctcgcagctgtattccaccgccgcgccagcgccaaacagatcgcccaccggcagatcaagaccctcggtgacccggcgatcaaactccagcatggtggtttcatcaaaggcgttgcccaggctgagcatcgggatctcgtgtttgacctgggtgaacgccgacagcgccgcactgccgacccgctgcgttggcgaatcacgcgttaccagttccgggtgctcggcctccagggccttgagctcgtggaacaggcggtcgtactcggcgtccggaatgctcggctcgtcgaggacgtggtagcggtagttgtgctgatccagttcagcgcgcagttcgaggatgcgggtatgggcggcagtcatgggtgttctctcataaagcaaaagagcagccgaagctgctcaatatgttagtgcacggattctacagacaacgcttaagatcgaacctcagcgtttctgtgtcagggcgcgacgctcgaactcgacgatgcgctgacggtagtgttcgatggtctgggcggtcagcacgctgcgttggtcgtccttgagctcgccgttgagttcctgggacagcttgcgggccgcggccaccatcacgtcgaacgcttgtttggggtgacgcgggcctggcaggccaaggaagaaactcaccgccggggtgctgaacaggtcgatatcgtccagatcgaaggtgcccggcttgaccgcgttggccatggagaacagcacttcgccgttaccggccatgctttcgtgacgatggaagatatccatctcgccaaaacgcaggccgctttcgaggatgttctgcaagagtgccgggcctttgaaaccgccggcgtcgcggcagatcacgctgatcaccagcacttcttcggccgccggctgatcgttcaccgattggcgtaccgcgctcttgctggacgtctcatccgggaaatcatcatcgcggctgctgaagctcgggccatcatcgacgtcgaggttcaggtcgccctgatgcggctcggcaaccgccgcgctaccgcgcttgccacgcttggacgacggctcacgggcttcacgcagcggcgcgctcatcgacggcaggtcgtgctcgtccagttgcggctctttgtgggtatccagcacacggggcggccccagcagctcagcggcgccgtcgtcgtcaggcaagttggacaggtttcggtccagacggaacttgagcttgcccttgccaccgcgcatgcggcgccagccatcaaaaagaataccggcaatgacaataatgccgatgacgatcagccactcgcgcagaccgatttccatgtaatcccgtgcctctaataaaaaatgctgaaaaataaggggtttagcaccgtgcaaaccgctttaaaacgtggcgccaactctatgttctgactgacgttttgcccacgcacacgaaaaattgacattaaactagcacgaccaaagataactttacaccgtctgtcaaaatgccttgaacaaatatgtccatttgccactttccccagaccggtaaatcgccctacgccgcactgtaaattctctctccggcatggctcaggattccaccatcgccatcgcctcttccacatccaccgcgaccaatcgcgaacatcccggttcatgcatcgtcacgcccatcaactggtcggccatttccatggcgatcttgttgtgggtgatataaatgaactgcacggtctgggacatctctttaaccaaccgagcgtagcgtccaacgttagcgtcatccagcggcgcgtcaacttcgtcgagcatgcagaacggcgccgggttcaacttgaagatggcaaataccagggccaatgcggtcagggctttttcgccgccggacaacaaatggatggtgctgttcttcttgcccggaggccgcgccatgatcgttacccctgtatcgagtagatcttcgcccgtcagttccaagtaggcgctgccaccaccgaaaacttttgggaataacgcctgtaaaccgccattaatctgatcaaaggtatctttgaagcggttacgggtttccttgtcgatcttgcggatcacgttttccaacgtgtccagggcttcaaccagatcggcgtcctgggcatccagataacgtttacgctcggactgctgctggtactcatcgatagcggcgaggttgatcgcgcccaggcgttgaatacgtgcggcaatccgttcaagttcttcttctgcgtctttctcgttggcctgggcggtcagggtgttgagcacgccgtgcaggtcatagccgtcttccagcaattggtcttgcaaggtcttgcgccgcacgctgagggcttgccattccatgcgctgttgttcgagctggccgcggatcaactgggactgctgctcggccatggtgcggcgcttttcggcgtcgcgcagttcgcggtcggcgtcttccagggcgatctgagcggtcttgagctccacgtcgacggtcatgcgcttgtcgagcaattcctcaagtttgaggcgcagctcttccagcggcgcctcgccctcctccaggttgaggctcagttgctcgcgcttttcggtcaggcgttcggactgcatctccaggcgctcaagagcctggcgcgtggaatcatgctgggcgcgcaacgagcccaggcgtacggccaactgatgggcgtggtccttgtgctgccgggcttcctggcgcacgcggtcaaggcgctcacgcaggctgtcgcgctgggccaacagcaattcgcgctgttcggtgtccagggccatgctgtcgagggcctcctgcaagtgcaggcgcgcttcaccgatctgttcatgttccagggcgcgctgttcgcccatttcggccacttcctcgtcaagacgggtgcggcgcagggtcaattgctcgaccttggccctgctcgcagacaactgggccttcaactcgccttgctggcgcgcttcgtcctgcaacagccgacgcaggtgttcgcggccggtttcctgctggcgctgggtagcgcgcagggtttgcagttcggtttccaggctttccagggtggcttcgcgttcttcacgctcggcgctcaggttgacgatttcctggccacgggccaatacaccactttccgcttcactggcgcgacgcacccgcaggaagtggcggccgacccaatagccatcgcggctgatcaggctttcgccggccgccaactgcccgcgttgggccagggcttgctcaagagactccaccggcctgacctgacccagccagggcgacagatctatcgccgcctcgaccttgtccagcaagctgcccggcacccgcgcaccatcagccgctgggctgagcaggcgcaggtcaccctgggcaaaaccggccaggtcgaagccgccgaaatcatccaccagcaccgcttgcagatcggcgcccagtacggtttccaccgccaactcccagccggcttcgactttcaagccttcagccaggcgcgggcgctcggccaaatgctggtcgcgcagccattcggcggtgccggtgccggggtcgagcgcggcttgctgcaaggcctccagcgaagccaaccgaccattgaggcgctgcaaatcgccttgggcctgctgctgcgcctgggtcgcggtgtgcaattgctggcgcagttgctccaggcgctccacttgctgttcttcgctggcctccagctcctccagggtcatttcgctttcggccagttgctcgctcaactgcatgattgccgcgtcttccgggtcggcagcgagcagtacgcgctcttcctgcagccggcgctggcgctcggccaggcgttccatgctggtttccaactgctggatgcgcgactgctgcacctcggcctggcggcgtggctcggcggaacgcaggttgaaggcgtcccactgctcctgccaaccgtgcatggtggtttcggattcttccagggccgcggcggcttcttcggcggcggcgctggtgatttcctgctcgggggtgagcatgtccagctcttcgcccagggtcagcagcaaggtgcggtcatggcccaggtgcgattcggtttccaggcgcgcgcgctcggcttccttcaagtcatcctgcaactggcgcaaacgctgctggccgtgctggatgctctgctcgacccgagcaatgtcaccgcccaccgaatagaagcgaccctgcaccagattgaagcgttcggacaactcatggtggccgtcacgcaggcgttcaatgctggcgtcggcattacgctgctcggccaccagcgcttcaaagctgacttcctgggtgccaataatcgcttcgcgctggcccacctgatcattcaatgcctgccagcgcagggccgacagttgcgccttgagctggcgctcctcgcccttgtattcctgatacttctcggcggcctgggcctggcggtgcaggcgttcgagctggcgctccagctcctcgcgcaggtcggtgaggcgggcgaggttttcgtgggtgcggcggatacggttttcagtctcgcggcggcgctccttgtacttggagatgccggccgcttcttcgataaagttacgcaggtcttcgggcttggcttcgatcagcttggagatcatgccctgctcgatgatcgagtagctgcgcgggcccaggccggtgccgaggaagatatcggtgatatcgcgacggcgacacttggtgccgttgaggaagtaactgttctgactgtcgcgcgtgactttacggcggatggaaatctccgcgtaagccgcgtattcgccgatcagggtgccgtcggagttatcgaataccagctcgatactggcctggctcaccggcttgcggctggtggagccgttgaagatgacgtcggtcatcgactcgccgcgcaggtttttcgccgagctctcgcccatcacccaacgcacggcgtcgatgatgttcgacttgccgcagccattgggccctaccaccgccgccatgttgctggggaagttcacggtggtggggtcgacgaaggatttgaaccccgccaacttgatgcacttgagccgcacgcttaggcgtccgccaaggctgcgatgaccagcgaactgctgcgctggcaataggctgtgagtaccaggcgaatctgcgccaggtcacgggccagtaccgcggcgagcaattgcgcgaacagcgcctggaactcgctcatggacgccttgcgctgatccagggccaggtaataagcgcggttcatcgccggctgcaggttttcgacggtttcctgcaaatacgggttgttggcgaaggggtacgcggcgcgcatcacgttgaagctttcttcgacgaacgcgcggatgtcctcgcgctccaggctcaattgaaggcgttgctggatctgcagaaacggcgccatgtcggcctgggtctgccagccttcggcaaccgcattgccgagcaggatgtacatctcgcccatcaacgtacacaggctctgcaccttgtgcgcggtgagttcggtgacgtgggcgccacggcgcggcaggatcgcgatcagatggcggcgctcaaggatcagcaaagcttcgcgcacggaaccacggctgacgttgagcgccagcgtgaccttctgttcctggatccgctccccaggcttgagatcgccgcgaatgatacgttcggcgaggtggtgagcaatttgctcggcgagactgtccggcgccttgaacgtcatgttttcccttcaaaatctgctatcggtacaagcgcggcagtgtagcgcattggcccgctgatggcgctacgcccaccgtggcgaatttggcacgaaataagcaacgttgaaagcctgtaagccgccaaaaacgccggttccagaagactggaccataattgaaagtgttgcgaccgcattttcttgacccttaggtcagaaaacaattgaccgaaaagtcagacatgactagattcggcgcaaagcggttaacaacaataatgagtctgcgaggccttccgtgatccagtttttacttaaccaggaactccgtagcgagcacgccctggaccccaacctgaccgtgctcaattatctgcgcgagcatgtgggcaaacccggtaccaaggaaggctgcgccagcggcgactgtggcgcgtgcaccgtggtggtcggcgagttacacaccgacgagcaaggcgccgagcagattcgttatcgcagcctcaattcctgcctgacgttcgtgtcgtcactgcacggcaaacaactgatcagcgtcgaagacctcaagcaccagggccaactgcacagcgtgcaacaggccatggtcgagtgccacggttcgcagtgcggcttttgcaccccaggttttgtgatgtcgctgtttgccctgcaaaaaaacagcgacgcccccgacagccagaaagcccatgaagccctggccggcaacctgtgccgctgcaccggttatcgcccgatcctcgccgctgccgaacaggcctgctgcaacaaaccccaggatcaattcgacagccgccaggctgaaaccatcgcccgcctcaaggccatcgcgccgacccagaccggtgaactcaacagcggtgacaagcgctgcctggtgccgctgaccgtcgccgacctggccgacctctatgacgcctacccgcaggcccgcctgctggccggtggcactgacctggcgctggaagtcacccagttccaccgcaccctgccggtgatgatctacgtgggcaacattgaagccatgaaacgcatcgagcagttcgacgaccgcctggaaatcggcgcagccaccgccctctccgactgctacgccgcgctgcaccacgaatacccggacttcggcgaactgctgcaccgcttcgcctccctgcaaattcgcaaccaaggcaccctgggcggcaatatcggcaacgcttcgcccattggtgactcgccaccgctgctgattgccctgggcgcgcagatcgtactgtgcaagggcaacacccgccgtaccctggcgctggaagactacttcatcgactaccgcgtcaccgcccgccaggacagtgagttcatcgagactatcatcgtgcccaagggccacacgctgtttcgggcctacaaggtgtcaaagcgcctggacgatgatatttccgccgtgtgcgcggcgttcaacctgaagatcgacaacggtgtgatcagcgcggctcgcgttgccttcggaggcatggccgccacaccaaaacgcgcaaaaaattgcgaggccgcgttgttgggcgccatctggaacttggccacggtcgagaaagcctgcgccgccctggcacaggacttcaccccactgtcggactttcgcgccagcaaggaataccgcctgctcagcgcgcagaacctgctgcgcaaatacttcatcgaactgcaaacgccgcacatcgagactcgggtgaccgcttatgtctaaccatcacgccgtggtaaaaacccaggccgaacttgccgcactgtttgcccaggacctcaccaccggggtggggcgcagcgtcaagcatgacagcgccgccaagcacgtcagcggtgaagcgcagtacatcgatgaccgcctggaattccccaaccagttgcacctgtatgcgcgcatgtccgaccgtgcccacgcccgcatcatcagcatcgataccgcgccctgctatgccttcgacggcgtacgcatagtcatcacccacgaagacgtaccgggcctgaaagacatcggcccgttgatgcccggcgacccactgctggccatcgacaccgtgcagttcgtcggccaggtggtgctggccgtggccgcccgcgacctggagaccgcacgcaaggcggcaatggcggcggtgatcgaatatgaagacctggagccagtgctggatgtggtcgaggcgtttcgcaacaagcacttcgtgctcgacagccacactcaccagcgcggcgattcggccgctgcgctggcaagtgccaagcaccgcatccagggcactttgcatatcggcggccaggaacacttttacctagaaacccagatctcttcggtgatgcccaccgaagatggcggcatgatcgtctattgctccacgcaaaaccccaccgaagtgcagaagctggtggcggaagtgctggatgtgtcgatgaacaagattgtggtggacatgcgccgcatgggcggtggctttggcggcaaggaaacccaggccgccagcccggcgtgcctgtgcgccgtggtggcgcgcctcaccggccagccgaccaagatgcgcctgccacgggtcgaagacatgctgatgaccggcaagcgccaccccttctatatcgaatacgacgtgggctttgacgacaacggccgcctgcacggcatcaacctggagctggcgggtaactgcggctgttcgccggacctgtccaactcgattgtcgaccgcgccatgttccacgccgacaactcgtattacctgggcgacgccacggtcaacggccatcgctgcaagaccaataccgcctccaacaccgcctatcgcggcttcggcggcccccagggcatggtcgccatcgaagaggtgatggacgccatcgcgcgccatctgggccaagacccgctggccgtgcgcaaggccaactactacggcaagaccgagcgcaacgtcacccactactatcagaccgtcgagcacaacatgctcgaagaaatgaccgccgagttggaagccagcagccaatatgccgagcgccgcgaagcgatccgcctgtacaacgcccacagcccgatcctgaaaaagggcttggcgctgaccccggtgaaattcggtatttcgttcaccgccagcttcctcaaccaggctggcgcactgatccatatctacaccgacggcagcatccacctgaaccacggcggcaccgagatgggccagggcttgaataccaaggttgcgcaagtcgtggccgaagtgttccaagtagacatcgaccgcgtccagatcaccgccaccaacaccgacaaggtgcccaacacctcccccaccgctgcctccagcggcgccgacctgaacggcaaggccgcgcagaatgcggccgaaaccatcaagcagcgcctggtggaatttgcggcgcgcaagtacgacgtgagcgaggcggacgtggagtttcgcaacggccatgtgcgcgtgcgcgagcagatcctcagcttcgaagcgttgatccagcaggcgtatttcgcccaggtatcgctctccagcacaggtttctacaaaaccccgaaaatcttctacgaccgcagccagtcacgcgggcggccgttctactactacgcgttcggggcggcctgctgcgaagtgatcgtcgacaccctgaccggcgaatacaaaatgctgcgcaccgacatcctgcacgacgtgggtgcctcgctgaacccggccatcgacatcggccaggtggaaggcggcttcatccagggcatgggctggctgaccatggaagagctggtgtggaacaacaagggcaagctgatgaccaacggcccggccagctacaagatcccggcggtggccgacatgccgctggacctgcgggtgaagctggtagagaaccgcaagaacccggaggacacggtgttccattccaaggccgtgggcgagccgccgttcatgctggggattgcctcgtggtgtgcgatcaaggatgcagtcgcgagcctcggtgattatcgccatcagcccaaaattgatgcgccggccacgcccgagcgggtgttgtgggggtgtgagcagatgcggcagttgcaggtgctaaaggctgttgatcgttcccacgctccgcgtgggaatgccgccctggacgctgtgcgtccgctctagtgacgctgagcgtcatggtatgcattcccacgcagagcgtgggaacgatctgactggaggtagacatggacaactggatcagcgccctcgccaccctgcaaaaccagggcgaaccctgcgtgctcgtcaccatcatcgaagaactcggctccaccccgcgcaacgccggttccaagatggtcatcagcgcaacgcacaccttcgacaccatcggcggcgggcacttggaatacaaggcgatgcagatcgcccgggacatgttggtacgcggccagcagaacacccacctggagcgcttcagcctcggcgccagcctgggccaatgctgcggcggcgtgaccgtgctgctgttcgagcccatgggccaggcgcaggcgcacatcgctgtatttggcgccggccatgtcggccgtgcgttggtgccattgctggcaagcctgccctgccgggtgcgctggatcgattcccgcgagcaggaattcccgcagcacattccccaaggcgtgcgtaaaatcgtcagcgaagagccggtcgacgaaattgccgacttgccagcaggcagttactgcatcgtcatgacccacaaccacgcgctggacctggaactgaccgccgccctgctcaagcgcaacgacttcgcctacttcggcctgatcggctcgaaaaccaagcgggtcaaattcgaacaccgcctgcgtgaccgtggctttgatgccacgcagttacagcgcatgcgctgccccatgggcctccccgaggtcaagggcaagctaccggtggagatcgccatctccatcgccggcgaaatcatcgccacctataacgccaatttcggccagcaccttgccggcgccgaacctattgccaaactgctgccggcttcgcgccgcagccacgctatctaaattgagacgatcatgcctttgactcgcaaagcctaccgtgccgccatcctgcacagcatcgccgaccctgccgttgttgggatcgatgcctcctacgaatatttcgaggacggcctgctggtgatcgacaacggccagatcagcgcccttggtcacgccagcgacctgctgccgagcctgcccgccgatattgacatcacccattaccaggacgcgctgatcacccctggcttgatcgacacccatatccacctgccgcaaaccggtatggtcggcgcctatggcgaacagttgctggactggctcaacacctacaccttcccctgtgaaagccagtttgccgacaaggctcacgccgaagaagtcgccgatatcttcatcaaggaactgctgcgcaacggcaccaccaccgcgctggtgttcggcagcgtgcacccgcaatcggtgaatgcattctttgaagcggccgagaaactcgacctgcgcatgatcgccggcaaggtgatgatggaccgcaacgcaccggactacctgaccgacaccgccgaatccagctaccagcaaagcaaggcgctgatcgagcgctggcacggtaagggccgcctgcactatgcggtgacgccacgcttcgcgcctacgagcacgccggagcaactgacgctggccgggcagctgctgggcgaatacccggatgtgtacatgcagacccacatcagcgagaacaagcaggaaatcgagtgggtcaatgagctgttcccggagcgcaacggctacctggatgtctacgaccattacaagctgctcggcgagcgctcggtgtttgcccacggcgtacacctgtgtgatgacgaatgcgcacggctggcagagactggctcggcggtggcgttctgcccgacttcgaacttcttcctcggcagtggcctgttcaacctgccgatggccgagaaacacaacttgaacgtgggcctgggcaccgacgtgggtggcggcaccagcttctcgctgctgcaaaccctgaacgaagcctacaaggtcatgcaactgcaaggtgcgcggctgagcccgttcaagtcgctgtacctggcgaccctgggcggcgcgcgggcgttgcgcctggaagacaagatcggcaccttgcagccaggtaccgatgcagacttcctggtgttggattacaacgccacgccgctgctgagctatcgcctgaaacaggccaataacattgccgagacgttgtttgtgctgatgacgctgggggatgatcggacggtactgcagacctatgcagccggccagctcgtgcaccagcgctgattcaagctacacacaacccatgtgggagctggcttgtgtgggagctggcttgtgtgggagctggcttgcctgcgatagcatcaccgcggtgtaactgatacaccgcggcgcctgcatcgcgggcaagcccggctcccacaaaagccctgctcccacatttgattgggtttacaactttacagacgagcgcccaggttttttagtctgtaaaagatgcgaaaacaccgcatgcaaatcatccgacgcgctctcttcatcgaggttgagcttgctgtcgatgtgatccatgtgatgcatcatcaagttcaccgccaacgtcgcatcacgggcttcgatcgcgtcgatcaactgggtgtgttcatcgtaggaacagtgcgagcggttgccgctttcgtactgggcgatgatcaatgacgtctgcgacaccaggctgcgctggaagctgatcagcggcgcgttcttcgcggcttcggccagcttcaagtgaaattcgccggagagacggataccggcgccacggtcaccacgggagaagctgtcgcgctcgtcgttgaccatctggcgcaactcggccaactgctcggtcgtggcgtgctgcaccgccaattctgtgatcgcccgctccaccaagcgccgggccatgaacacctggcgtgcttcttcgacgcttgggctggcaaccaccgcaccgcgattgggccgcagcagtaccacgctttcatgggccaggcgcgacagcgcgcggcgaatgatggtgcggctcacgccgaagatctcgcccagtgcctcttcactcaatttggttccgggcgccaggcgttgttcaaggatcgcctcgaagatatgcgcatagacgatatcgtcctgggttccgctgcgaccggccttgccggctcgcggttgtttcttgagaggttgcaactgttcgttcatgggcactcgggtttgagaacggcgaattaacggtaatacggcaacagcgtgtcgctggcaagtatcacctaaaaacagcgcacattgtacacaacccactgtgccaacacactgtacggctgtttgcgggctcggctgtattgcaatgactggttacgtttgagtttaggcttgaatccacgatttcccatgaacgacatcccactgtaggagcgagcttgctcgcgaagaacccaagggcgccgcgtttaatctgattgcccgcgttatcgttggcgattttcgcgagcaagctcgctcctacagcgtgcggagtcaggtaaaaaggaacacctctccatgaccgacgccacccaagcgcccttgcgcccactggccgacacttctgcgtcggccgtcgtcgccggctttatcgccatgatgaccggctataccagctccctggtgctgatgttccaggccggccaggccgctggcttgaccaccgcgcagatttcttcgtggatctgggcgatttccatcggcatggcggtgtgcagcatcggcctgtccctgcgctatcgcacaccgatcaccatcgcctggtccacccctggcgcggcgctgttgatcacaagcctgggcggcgtgagttatggcgaggccatcggtgcctacatcacctgtgcggtactggtgacggtctgcgggttgaccggcagctttgagaaactggtcaagcggattccggcctcactggcggcggcgctgctggcggggattctgttcaagatcggcagcgaaattttcgtcgccgcccagcaccgtaccgggctggtgctggggatgttcttcacctacctgatcatcaagcgcctgtcgccgcgctatgccgtgctggccgccttgctcatcggcaccgccttgtcagggctgatggggttgttggatttcagcggctttcatctggaggtggcgacgcctgtttggacgacgccgcacttctcgctggcggcgaccatcagcatcggcattccgctgttcgtggtggccatgacctcgcagaacatgcccggcgtagccgtactgcgcgccgacggctataccgtgccggcttcgccattgatcaccaccaccggcctggcgtcgttggtgctggcaccgttcggctcccacggcatcaacctggcggcgatcagtgccgcgatctgcaccggcccccacgcccatgaagaccgcaacaagcgctacaccgcggcggtgtggtgcggggtgttctatggaattgccggggtattcggcgccacgctggcggcactcttcgcggcgctgcccaaggagttggtgctgtcgattgcggcgttggcgttgtttggctcgatcatcaatggcttgagcatcgccatgaatgagccgaaggaacgggaagcggcgctgatcacctttatggtcaccgcgtcaggcttgacgttgttttccatcgggtcggcgttctgggggattgtggcgggggtgttgacgctgctgattctgaattggcgcaaggcataaaaaaacggcgaccctcaggtcgccgtttttttcagtatcacttagccgcgttgatcggcttttctggataccacacgtccagcaacgggctgacttcagccttggtcagctcggaacgggttttgagccaggcttcgaccgcagcacgctgctcttcggagaccgagccacgcttctgcaggcaaaccagaccgtagtcatcgccgccgacatagcccaggccgttggcttccatggcttctttgatgaatgcttcgaggaaagcgtcgatagcttcttcactcaggccttcgttgaagtccaggttcagttcgaaacccagctcttgaaattcatcaacgcacagttttttgcgcagacgctgggaacggttagtcgccattggaacaatcctcataagtattaacgggcggcactttagcagtttaaggcggcaattgcccgactctctgggaccgacgggcaaatgcgcgcaaaaaaaccacgattagcagctatcgttcagctacacgtggcgccagcttggggcataatgccgacactttcgtgaccactgagggattttcttccatacccctcgcctttttcaccctcctcagcagtagggttttatttcttatgatcaaatctttgcgttcagtgttacttgccagtgttgtcttgcccctggccttttccgtttgcgccgctcccgtcaataacaccctgccacccagcgttgcccaggccttgcagaaggccaagctgcaaaataccgcgctgtccctggtgatgctgcccctgaacggccctggtacccctacggttttcaacgccgacgtctcggtgaacccggcctccaccatgaagctggtcaccacttacgcggccctggaaatgctcggccccaaccatcagtggaagaccgagttctacaccgatggcaccctcagcggcggcgtgttgcgcggcaacctgtacctcaagggcggcggcgaccccaagctgaacatggaaaaactctggctgctgatgcgcgacctgcgtgccaatggtgtgcagcaagtcaccggtgacctggtgctggaccgaaatttcttcaaccagccgcaattgcccgagttcaacgacgacggcaacgatgagaacaagccattcctggtcaagcccgacgccttgctggtcaacctcaaggccctgcgcttcgtgacccgcaatgattcaggacgggtgatcgtatcggtcgaaccgccgattgccagcatccgcatcgacaaccaggtgaaagtcaccaacgccaaacagtgcaccggtgacgtgcgctacagcccggtgaccgccgccgacggcagcgtgaccgtgaccgtcagcggccaactgggtgatggctgcagctcgcagacctacctgtcgctgctcgaccacgccacctacaccgcaggcgccgtgcgggcgatctggaaggagttgggcggcaccatccagggccgtgatatccaggcaccggtgcccaaggatgccaaagtcctggcccgggccttctcgccggacctggcggagatcatccgtgacatcaacaaatacagtaacaacaccatggcccagcagttgttcctgagcctgggtgcacagtttcgcaacgatgccgatggcgacgatgccaaggccgcgcaacgtgtcgtgcgccagtggctggccaaaaaaggcatcaccgcgccgcacctggtgatggaaaacggctccggcctgtcccgcgccgaacgggtcagcgcccgcgagatggcggccatgctgcaagccgcgtggaaaagcccttatgcggcggagtacatcagctcgatgccgatcgccggcaccgacggcaccatgcgtaaacgcctgaaaaccaccgccctgcgcggcgaagcccatgtgaagaccggcaccttgaacaccgtacgcgccatcgccggttacagccgcgataacaatggcaatacctgggcggtggtggcgattctcaacgacgccaagccttggggagcctcgtcggtgctggatcaggtgctgctggacctgtatcgccagccgaaggccgttgcagccgcaccggttctctaaagcaccacatcaccctgtctgatcgttcccacgccctgcgtgggaatgctgttttggacgctctgcgtccgcgctcaaggcgtgacgcggagcgtcttaggatgcattcccacgcagagcgtgggaacgatcattcaagcgtcagggcttcctcgacccgatccctgcccgcctgcttggccacgtacaccgccgaatccgcgcgcagcagcaagccatcgataccttcgtcgagccgccaactggccacgccgaagctggcggtgacaacccccaccggctccatcgacgcaccgcgcagcgactgccacaactgcatcgccaggctgtaggcctgggcgccatcggtgttggggcacagcaccacaaactcttccccgccgatccggcaaaacacatcggtgcggcgcaagcgttggccgatacgcttgcacaactcctgcagcacgccgtcgcccacggcatggccgtgctgatcgttgatgcgcttgaagtggtcgatatcgagcatgatcaacgacagcgcgccagacatacggttgagccggagcatttcgcccttgaggcgatcctggaaatagcgacggttatagatccctgtcagagagtcggtgatggacagcgcacgcagttcttcctcgacccgtttgagatcagaaatatccgacacataaccgtgccaaagcgtaccgcctcccggcaactcttccggcgtcgcttcgccgcgaatccagcgcaggcctcgttggggtaattgcacgcggtactcttcgcgccaatggctcagttgcaacgcagaaaggcgtatcgacgcacgcacgcgctccaggtccaaggggtgaatgcgctccagcactttgcccgcatcctgctgcagcatgcccagttcgatttcatagatatcgcgcatgccttcgctggcatagatgaaacgccaggtgtcctggggctccagggtgaactggaagatcccacccggcacgtgggcgctgagttttttcagcagacggtcgcgtacagcaagggcctcataggcgcgcttttgctcggtgacatccaggtaaatcgccaggtgcccgacccacaggccatggtcatccaagagcacggtcggcaacatgttgaccgtcagttggctgccgtccttgcgcaccagcgtccactcacgcccttcatgttgactgtccgggctctccaccagcatcgcctggctcgcggggatgcgcttgcccagcgccctgctcaacggctcagcgcgggcgtcgagttccatggctacgtgcagacggtccaaggtcatatgccccagcacctcctcggccgtaaagcccagcatctgctcggcaccggcattgaaggtgttgatcaccccgcgcaggtccgtggcaatgatcgccacttgagtcgccgcattcagcacgctgcgcaattgcccatgggcgccacgcaactcctgctcgcgggcacgcaattgaacggtgcgttgctccaccagtttcagtgcgcgctggcgctggctcaccagcatgtaaagcagcgcactgagcaaggcgctgagcaacacgcccatcgccagaatggtgtgcatcgaagaatggttggccctgtcgaacacttcgctggcgctcaggctcagggcgtagacatgatcgcccagggtgaggcggcgcgcagccgtcaagccgctgctgcccaaggtgttgctggaggcatacaacacccgttgctgggtgtcggaggtgtctacgatctgcatcaccaggttgtcccggttgggcctgggcaacccctcggctaccagctgacgcatgctgatcaccgccatcacataaccgtagggctcggcaccagcgagtttgctcacgggcgccaccaacaacacgcctgcggcatatgcgggttccacccccaccaactgcatgggttgcgacactgccagctggccgctttcttgcgcacgctccagggctgagcgacgcaggggttgggccagcagatcaaagcccagcggcgagcccagcagactttgcgtctggctgtacagcaccggtacatattcatcgcgttcggccgctggtgccaactcacctgcagtattcagttcgcggatactgaagggaatgccgcgctggcgagaaatgtcctgctcaaacaggttgcgctgcgtgcgaaatacccgtggggcccaggcataggcacgggcatgcaacaacagcggtttggcgaaaccgtcgaactcggcgcgagacacctcgccggaattgacgaaaaagcgctgcaagctacccaggcgttgctcctggtcttcaaaacgttcctggatgcgggtgtagcgctcgttgaccagcaactggaaccgctggcgcacctgttgctgatataagtcggatgccgcccacgcgacgaccaccgtcagcgcgctaccgatcaataacaccaccaatgccaccagccaagccgatgcctgctcactgataaaaccaaggattttcgggcgaacgacttgcatcggcataggcaacactcacagcgccagtgtgcgggggtgtcactttggctagggcttaagttatagccatcggcagggtgtttgaccagcgtaaaaccgtcacggacttattgtgggcgagggagcaagctccctcgccacagaggcttactgtaggagcgagcttgctcgcgaaaaactcacaggcaccgcgttcatccaggatatccgcggtatcgttgacgatcttcgcgagcaagctcgctcctacaggggaaaatcagcgtgcggtgattttccaggcgcggtggatcttggcattgcgcgcaaaatccgggtcgatggtcttgtcgctgatttcctcgaccgcatagcgttcgctgaggttgtcttctagctggaacttgcggaagttgttggagaagtacaacacgccacccggcgccaggcgcgccatggccaggtcgagcaactgcacatggtcacgctgcacgtcgaagatgccttccatgcgcttggagttggagaaggtcggcgggtcgatgaagatcatgtcgaattcatcgcggctcgcttccagccacgccatcacgtcaccctgttccaggcggttcttgtcggaaaaaccgttgagggagaagttgcgacgcgcccagtccaggtaggtcttggacaggtcgacgctggtggtgctgcgcgcaccgcccttggcggcatgcacactcgcggtggcggtgtagcaatacaagttgaggaaacgcttgcccgccgcttccttctggatgcgcatgcgcatcgggcggtggtcgaggaacaggccggtgtccaggtaatcggtaaggttgaccagcaacttcacgccgccttcactgacctcggtgaatttaccttgggcactctgacgctcgtattgcttggtgccgctctgacgctcacgacgcttgaccaccacacggctcttgtcgacgttcagtgcctggggaatggccgccagggcatcgaacatgcgggccgaggctttttccgggtcgatggatttaggcgcggcgtactcctgcacgtgcacccaatcgtggtacaggtcgatcgccatggagtactcaggcatgtcggcgtcatacacacggtagcaatccaccccttcgcgcttggcccatttgcccagcagcttgaggttcttctgaaggcggttggcaaacatctgcccgccttcgctcaagcgcgcctgctccaccacgggggccggggcgggcttgatcgggttgccgttcttgttgtactgacgctctgccggctcgctcggggcctggtcgtaggccgcttgctcacgttcggcctggcgctgttcaggagtgcggcgctcgccagtgacgaactgatccgggttgaccttgatcagcaacaatttgcacggcaatgcgccgttccagaacgaatactgtttgtggctacggatacccatgcgcttgcccaggtccggcgcgccggtgaacactgcggcttcccagcccatacaggcttggcgcaagcgttcgccgaggttctgatagagatacaacaggctggcttcatcacccaggcgctcaccgtagggtgggttgcagatcaccaaacctttctggttctggtccgggcgcggctcgaacgtgcccacttcgccctggtacaccttgatccagtggctcaggccggcgcgttcgatgttgttgcgtgcgggctggatcaggcgcgggtcggcttcgtagccacgtacccacaacggcggcttgttcatgccgatggcggcacgctcagtggcttctgcgtgcagttttttccacagcgccgggacgtggcccagccaggtagtgaacccccagagttcacggttgaggttgggggccatgtcggcggcgatcatcgcgccctcgaccaggaaggtacccacaccgcacatcgggtctgtgagtgcgccgccttcggctgcaatacgcggccagccggcgcggatcaggatcgccgccgccaggttttccttcaggggtgccgcgccctgctgcaggcggtagccgcgctggtgcaggctgtggccggaaaggtccagggacaggatggcttcgccacggtccaggcgcaggtgaatgcgcaggtcagggttgatcttgtcgatggacggacgttcgccggtcggggtgcgcagtttgtcgacgatcgcatccttgaccttcagcgcgccgaagtgggtgttgtcgatgcccgagccatggccgctgaactccaccgcgagggtaccgtcggggaccatgtggtcagcccattcgatgtccagcacgccgtggtaaagatcctcggcgtccttcatcgggaagcgcttgagcaccagcaacacacggttggccaggcgcgaccagaggcacaagcggtaggcggtttccatgtcggccatgccgcgcacggccgaggtgtgctcgcgggcttcctcaaggccaagcccgacggcttcctcgatcagcaggccttcgaggcccttggggcaggtgaggaagagttcaaaacggtccgacatggggcattccaggcttttcagcaataagtgaacaggcgacgcatcgccggttcggttttcaatcaagcacttttctcgaagagtgctcgcgtggcacgaatgtgccgttccaccccgtctggcgggctcttgagcctttatgggcgaggcagaagaagaatgttgcgcaacaaaaagaaatattccgacccttcgtcgaataataaccgactgcaacaggcgggcattctcactaaggaattaaacctttcctctatgcagggcacatcatagctggctttgccctataaaaggggcgaataaccagcccagcttatggctatagcatcgttatcgttacgtgcttatgacaaaacgatcattgaatacatgtgacctattggttagaactcaacacaggttggcgccgtaacggtgccaacacattggctcgccacgccggcagcgagcccaccaacggcagaaaaactctgcccggccttggacaaggccgaaggatatctagacagtcaacaagtgagggaaacaccctatgagaagacttaagcgtgatccgttggaaagagcatttttacgcggatatcaatatggcgttcatggaaaatcccgtgagctttgcccatttactctaccgtcggtacgccaagcctggatcaacggctggcgagaaggacgcggcgacaactgggacggtatgactggcactgcgggcatccacagactcaacgaacttcacgccgtcggctaatcaggggatttaattgcgacacacacatctttgaatctgtaacgacttaaccacgcgcgccccatccgggcggcgggcttcggcccaggggctccttcatggagccctttttattgcctgctcagcgcaaggcagcgatggcatccaccgactggcgaatcaatgccgggcctttgtagatgaagccggagtacaactgcaccaggctggcgccggccgcgatcttctcagccgcatgcttgccttcggtgataccgcccaccgcgatgatcggcaaacgcccagccaactcggccgccagcaccttgacgatatgggtgctcttgtcacgcaccggtgcgcccgacaggccgcccgcctcgtcaccatgagccaggccttcgacgcccacgcggctgagggtggtgttggtcgcaatcaccgcatccatccctgaatccaccagggcctgggccaccagtacggtttcttcatcgctcatgtccggcgctatcttgatagccagcggcacacgcttgccatgacgcacggccaagtcttcctggcgctggcgcaaggcttcgagcagttgcttgagggaatcaccaaattgcaggctgcgcaggcccggggtgttgggcgagctgacgttgacggtgacatagctggcgtgggcatagaccttgtccaggcaaatcaggtagtcatccaccgcacgctccaccggcgtgtcaaagttcttgccaatgttgatacccaggatgccggtgtacttcgccgcctgaacccgcgacagcagatggtcgaccccgaggttgttgaagcccatgcgattgatgatcgcctccgcttccggcaggcggaaaatgcgcggcttggggttgcccggttgcggccgcggcgttacggtgccgatttcgacaaagccgaaacccaactgcgcaaacccgtcgatggccgcgccgttcttgtccaggccggctgccagcccgaccgggttggggaagttcaaccccatcaccgacaccggcactttcgccggtgccttgcataccaggccattgagccccaggcggccaccggcaccgatcaggtccagggacagatcgtgggaggtttccggggagagtttgaacaacagctggcgggccagagtatacatgggcgggctagactcggatggcggcaaaaggtggcggtgattatagccggggtggtggcctgcatgcgaggcgtgccacctgatctcattgacgttgcgccgtcaacgcctcataacgcacccagatcctttcggcgtagcgcagacgcaatgcctcacgctgtggcccgggccccggccccacgttgtaagcccccaccgccgtccagttgtagccaaaacgctggatgaactcggcaagaatcgaggcgcctacttccaccgacaggcaaggctcgctcaacagccgttcttcggtaatgccctgcttgagcaagcgcggcaagtggatgctgttgatttgcatcaagccgatatcccgcgtgccattgcggttggtgtagttcatcgcttgcgcccggtaacccgattcgaccaaggcgatagcttgcagcaactccggctcaaggtcgtagcggctggccgcctcttcccagcaaaaggcccaggcctggctgctgcccatcaataccccgagcaccaggcctttgccccatgccttaaacctggacattgctggcctgaccacagacggcgcacacgtgtgccactgccctgggttgatcacctgtgcgcaccgggcaggtaaagcgatagcccttgccataaatcgtcttgataaagcctttgtcggccctcaagtgcttgcgcagagaataaatacaccgcgtgagtgactcttcggccacttcgccccgaggccaggccagttccagcaaacggtccttggtcatcagcgcgccaccggaggccagcagcaaccgcagcacgtgcccctccttgggaggcaactgaatatccgcctccacgcccgtcaaccggccgtcgccatgcaaggtccaacgcgcgaaaaccagggacgtcgtcgtttcatccgtcacgacggccatacgcacctctgtagtcgactactgacattaaaatccttattgtgtgaccagctcatctgccattggcacgactataaaaaaccggctcgaagacccgcgttaggaaaaaacccattcattcgcctttttttggccactgccggtcagacaattcgctaacgcacccttaccgcggcaaccactcctgaaacgtctcctgcaattcaacccctagccgatcctccaactgcaccaactctcccactgccatcagttgtccattgacccgcacctccacgcagcgggtgacgcctgggtccaagggcagcaccttccccggtgcgaatgcggccaaacgcttgcggctgatcagttgctcctgcagcaatatttccaggtgcatggacaaacgcctttttcagggggaaaactcagggtccgctcccaggaacgcacgtcgcacacgctcgtgttgcgcggcgctcaactgaggtgggccgatccagggcagtacgtcgccatctacgccagcctgccctggcgaggcctcatccagcggctgggcgacatccagctcggccaccagtttttcaataaccttcacttgggcgggtgggcccttgatcaacagactgttggtatctggataggccatcaacacaaggcggccatcggccagttggtccttctgcgcctgggatagccgagcttcgagcatggaggccatgcccggtacctggaccttgttggctccagcgccctgcaggtgatcgtccacgaggacattgatcactttcaccacgccgaataccggggcgcgctctggcaccttgcgagggggtcggtccatccgttgggcgagatgcaacacctggtcgacataactggaagggccggttacatagaacgtacgcttgccgtgttcacgcagtgggtaacgcggctcatccagccccgcacggcgcatgatgccgcgcagcctactgacggaaatatgccgcagtaccaccgccgagcttctcgtgtcgtcggcagcgtagagctgcaacacctcgccacaggccgtacgactgcccagcaacagcacggcgcacagcagcgcgctgtacagccagcggcaattgagggttgcgagtaaatcagcgtgcaccgtgggtatgcctggtggtctggcctgaagaagcggccatactgcgaggcgcacgaggatcaatcatgatggaaagttgacggccaactgcgacgtcctgcccatggcatgtgccttgctttgcactctggatcaggctcgcaccaacggcggcacgggcctacggacaaaggcgtcgttcccctgcaatggcctatacgccaaccagggaaacggcgcttttttttcagaaaaaggcaggtattgatgaacgatccactggcttgggtaaacggcagcgatgccccggaaaagagcagcctggaccttgggttcatggccctgaccgattgcgcctcgctggtggtcgccgccacccagggcttcgcccaaccctacggcctcacactcaacctcaagcgccaggcgtcctgggccaacctgcgcgacaagctggtcagcggtgaattggacgccgcccacagtctctacgggctgatctatgccgtacacctgggcatcggcggcgtcgcccccagccccatggcggtgctgatggggctgaaccagaatggccagggcatcaacctctcccatggcctgcaacagcaaggggtgatcactcctgaagcattgaaacgccacgtgcaccaaagccggacaaaactcaccttcgcccagacgtttcccaccggcacccacgccatgtggttgtattactggctggcgagccaaggcattcatcccttgcaggatgtgaacagcgtagtagtgccgccgccacaaatggtggcgcacctgcaagccggacgcatcgatggcctttgcgtgggtgaaccctggtgcgccagcgcagtgcaacagaaccagggcttcaccctggcgaccagccaggcgatctggccggaccacccggaaaaagtcctgggctgcacccaagccttcgttgacgcgtaccccaataccgcacgcgtgctggtcatggcgatcctcgaggccagccggtttatcgagcagagccgtgaaaaccgccgctctaccgcccagttgctcagtgcccctgaatacctcgatgcgcctgtggcttgcatcgaaccacgcctgctggggcactatggcgacggcctgggcaaccagtggcaggatccccatgcgctgcgctttttcgccgacggcgaggtgaacctgccctacctcagcgatggcatgtggttcatgacccagttccggcgctggggcttgctgcgtgaagacccggactacctgggcgtcgcccggcaggtgcagcaactggcgctgtaccgccaggcggctgaggcgctgggcattgccgaaggcaactcggacatgcgccgtagccagttgctcgacggcaagacctgggacggcagcgaccccgccggctatgcgcgcagcttccacctccacgccttggccgataacgccaaccgccaagcgctgcgctgacaggagcccgacgatgctgcgaatcctgttgatcaacgacaccccgcgcaaggtcgggcgcctcaaggccgcattgaccgaggccggctttgaggtgatcgatgagtccggcttgaccatcgacctgcccgcacgcgtcgaaacagtgcgcccggatgtgatcctgatcgataccgagtcacccgggcgcgatgtgatggagcaagtggtgctggtcagccgcgatcagccccggcccatcgtgatgttcaccgacgagcacgacccgactgtgatgcgccaggccatcaagtccggcgtcagtgcctatatcgtcgaaggcatccaggcccagcgcctgcaaccgatcctcgatgtggccatggcgcgcttcgagagtgaccaggccctgcgcgcccagctgcatgcccgcgaccagcaactggccgaacgcaagcgcatcgaattggccaagggcctgttgatgaagatgaagagctgtaacgaagaagaggcctacaccctgatgcgccgccaggccatgagccgtcaacagaaactgatccaggtggcagagcagattattgccatgagcgagttgctcggctgatgtggctcagctcttgctaaagaattatcacaggtagccaacggcggttgccccctccacgacaaagacgtcgcccacccggtttgccctcgcgaacccggtggcggcgttttttcgtttctagacccccaaccgttgaggtgcgtgatgaaatcaagcttctggaaatccgggcacaccccgaccctgtttgccgcgttcctgtatttcgacctgagcttcatggtctggtacctgttgggccccctggcggtgcagattgccgctgacttgcacctgaccacccaacaacgtggcctggtggtggccacaccgatcctggcgggcgcggtgctgcgtttcttgatggggatgctggccgacaagctgtcgcccaagaccgccgggctgattggccaggtgattgtgatcgtggcactgttctgcgcctggaaactggggatccacagctacgaacaagcgttgctgctgggcatgttcctgggcatggccggcgcgtcctttgcggtcgccctgcccttggcgtcccaatggtacccggcggagcaccagggcaaagccatgggcatcgccggcgccggcaactccggtaccgtgtttgccgcgctgctggcgcccgtgctggcggccgcgtttggttggagcaacgtgttcggttttgcgctgatcccactggtgctgaccctgatcgtgttcgcctggctggcgcgcaatgcccctcagcggccaaaagccaaagccatggccgactacttcaaggccctgggcgaccgtgacagctggtggttcatgttcttctacagcgtgaccttcggcgggtttatcggcctggccagcgccctgcccggctacttcaacgaccagtacggcctgagcccggtgaccgccggctactacaccgccgcctgtgtgttcggcggcagcctgatgcgccccttgggcggcgccttggcagaccggttcggcgggatcaagactctgctcggcatgtacagcgtggcggtgatctgcattgcggcagtggggttcaacctgcccagttcctacgcggcgctggcgcttttcgtctgcaccatgctcggcctgggcgccgggaatggcgcggtattccaactggtgccgcagcgttttcgcagtgagatcggcgtcatgaccgggctgatcggcatggccggtggcattggtggcttcgccctcgcggcgggcatgggcgctatcaagcagagcaccggcagctatcaactggccctgtggttgttcgccagcctcggtgtgctggcctggttcggcctgcatggggtgaaacggcgctggagaaccacctggggttcggccgccgtgaccgccgcccgcgtctgatgagcctacgactgagcgtcgcccaggccagtgccatcggcccgcgcagcgaaaaccaggatgccctgcgggtggtcacgcccatggcggaactggccgccagcaaaggctacctgtgcgcactggccgatggcgtcagccaatgcgccgacggtggcctggccgcacgctcgaccttgcaggccctggccctggactactacgccacgccacagacctggagcgtggcccaggcgctggagcgtctgttactggcgcagaatcgctggttgcaagccaacggcggcgggcaaccgttgctcaccaccctgagcgccctggtgtttcgcggccaacgtttcaccctggcccatgtcggtgattgccgggcgtatcgttggcttgacggcgagttgcaacgcatcagcgaagaccatgtgtgggaacagccggggatgcagcatgtgctcaagcgcgccctcggcctggatcagcacctggtgctggacttcctcgatggtccattgcgcgagggcgaaagtttcctgctgctcagcgatggggtgtgggccacgctgggcgatcacagcatcggcgcgatactgcgcgaacaaagcgacctcgatctggccgtcaacacactggtcaacgccgcccacctggcgggtagccaagacaacgccagcgccttgctggtgcgcatcgatcaactcggcgccgccaccctcggcgacgctctggtgcagttgcagcaatggccactgccgccaccgctgaaagtcgggcaaacctttgaaggctggcaggtgcaaagcgtgctggcgcagagtcggcagtcgttgctgtaccgcgtgcacgacgcccaggggcaaccctggctgctcaagaccttaccgttacgttgcgacgataccgatgcggcccaggcgttgttatcggaggaatggtttctgcgccgggtcgccggccgtgcctttcccgaagtgcatgccgccagtggccgtcagcatttgtactacgtgatgcgcgaatacgccgggcaaaccctggcccaactgttccaacaacagggcccgctgccgttggcacaatggcagtcgattgcagaacgcttgctgcgcgccgtgggcctgctgcatcgccggcagatcctgcaccgcgacatcaagccggaaaacctgctgctgggagaagatggcgaactgcgggtgctggacttcggcctggcctattgccctgggctctccgaggaccgtgcccacctgctgcccggtaccccgagctttatcgcgcccgaggcgttcgctggcgagcagcctacggcgcaacaggatttgtatagcgtcggcgtgaccttgtattacctgctgaccgggcattacccctacggtgaaatcgaggccttccaacggcccagatttaaccagcccgtcagcgccagccgttatcgccccgacttgccggagtggttaccacacagcctggaacgggcggtgaccgctgccccggcccaacgttatgaaaccgccgaagaatggctgttggtgctggagcaggccgaccgccgcgaattgagcctacgcccacggcccttgctcgaacgcgaacccttgaaggtctggcaaaccctggcggtggcttcaatgctgctcaatctggtgctgttgtactggctgctgcaccactaacgggcagaatccgccggttctgcgtgtaaacgcccagtaaaactggggctatagggacttggcacagctgctgcattagctttcccaacaccccacatatagccgctccttcaacgacgaagggccgagcttcccgagagaacgggaccaggacaaaggcgtcctcgctagctgactagcggggacgccttttttgtttgcgcacgatttgtcgagccattgcggagaacgacatgaaaaaactcaaactggtgatgatcggcaacggcatggccggggttcgcaccctggaagaactgctcaagctgagcaacgagctgtacgacatcactgtgttcggcgccgagcctcacaccaactacaaccgcatcctgctgtcgccagtactggccggtgagcaaaccttcgaagagatcgtgctcaacgacctggattggtacctgaacaacaacgtcaagctgctgctcaaccgcaaggtggtgcagatcgaccgggtcaagcgcaaagtcatcgccgaagacggcaccgaggccgagtatgatcgcctgctgatcgccaccggttccacgccgtttatcctgccgattcccggcaataccctgcagggcgtaattggctaccgcgacatcgccgacacccaagcgatgatcgacaccgccaagactcacaagcatgcagtggtgatcggcggcggcctgctcggcctggaagcggccaacggcctgatgctgcgcggcatgcacgtgacggtggtgcacatcggtgaatggctgctggagcggcaactggacaagaccagcggccagctactgcaaaccgaactggaaagtcgcggcctggtgttccgcctgtgcgagcagacccaggccctgcacgatgccggcaatggccgcgtcggctcggtgcagttcaaaaatggcgacatcatccccgccgacctggtggtgatggctgccggcatccgccccaacaccgaactcgcggaaaagtccggcattccctgcaaccgtgggatcctggtcaacgacaccatgcaaacctacgacccgcgcatctacgcgatcggtgaatgcgccagccatcgcggcatcgcctatggcttggtggcgccgttgttcgaacaggccaaggtctgcgccaaccacctggcccaactggggtttgccacttacaagggctcggtgacctcgacaaaacttaaagtcaccggcatcgacctgttctccgctggcgacttcatgggcggcgaaggcaccgagaccatcaccctctccgacccgattggtggcgtgtacaaaaagctggtgatcaaggacgacattctggtcggcgcctgcctgtacggcgataccgccgatggcggctggtatttccgccagatccgtgagaatcacgccatcggtgaaatccgcgatcacctgatgttcggtgaaaatgcactcggcgatgtcggccaccaaggccaggacaaagccatgagcatggccgacagcgccgaagtctgcggctgcaacggcgtgtgcaagggcaccatcgtcaaggcgatccaggaacaagggttgttcagtgtcgatgaggtgaaaaaacacaccaaggccgccagttcctgcggttcctgtgccggcctggtcgaacagatcctgatcaacaccgtgggcggcgccgccgacgtcaagcccaaaagtgaaaaagccatctgcggctgcagcgacctcaaccacgggcagatccgccaggccattcgcgagcagcacctgctgaccatcgacagcaccatgcgctacctgaactggcgcacccccaatggctgcgccacctgccgcccggccctcaactattacctgatctccacctggcccggcgaagccaaggacgacccacaatcgcggctgatcaacgaacgggcccacgccaatattcaaaaagacggcacctactccgtggtgccacggatgtggggcggtgtgaccaacccttcggagctgcgccgcatcgccgatgtggccgacaagtacaacgtgccgatggtcaaggtcaccggtggccagcgcattgacttgctcggtatcaagaagcaggacttgccaggtgtgtggaaggatctggatatgccgtccgggcacgcctatggcaaatccatccgcaccgtcaaaacctgtgtgggcagcgagttctgccggtttggtacgcagaactccacacaactgggcatcgagctggagcatgacctgttcaatatgtggtcgccccataaggtcaagttggcggtctccggttgcccacgcaactgctcggaagcgggcatcaaggatgtgggcattatcggcgtcgactcgggctgggagatgtacatcggcggcaacggcgggatcaagaccgaagtcgcggagttcttcgtcaaggtgaaaaccgcggaggaagtacgcgaatacaacggcgcgttcctgcagttgtaccgcgaagaagccttctatctggagcgcaccgtgcactacctgcagcgggtgggcatggagcatatcaagaaggctgtattggaagacccagcgcgccgccaggccctcaatgagcgtttgcagttctcgttgtcattcgagcaggacccgtggaaggaacgcctggaacagccgctgctgaaaaaggaattcgacgtgatccctgtcaaacaactggaggtctcgctatgaactggctggatatctgcgccctcgatgaaatcaacgccctgggctcgcgcatcatcagcgggccgaaaggtgacatcgcgatttttcgcaccagtgacgacgaagtctttgccctcgacgaccgctgcccgcacaagggcgggccgctgtcccaaggtttgatctatggcaagcgcgtggcctgcccattgcacaattggcagatcgaccttgagtccggccaagcccaggccccggatatcggctgtgcccaccatcaccaggcccgggtggaaaacggccgggtgatgctggccctgcgggacgcgggttgatgaaccgccagaccaccgcgtccacctgctgttattgcggggtgggttgcggcgtgctgatcgagcatgacggcgaacagatcctgggggtgcaaggcgaccccagccatccggccaacttcggcaagttgtgcagcaaaggcgccagcctgcacttgaccggcgacttgagcgcccgcgcgctctacccgcaattacgcttgggcaaagacctggcacgcacccgcaccgactgggacaccgccctggaccacgcggccaacgtgttcgccgataccattgccgaacacgggcccgacagtgtggcgttctatatctccgggcaactgctgaccgaggactattacagcttcaacaagttggcccgtgcgttggtgggcaccaacaatatcgacagcaactcccggctgtgcatgtcgtcggcagtggtcggctacaagcgcagcctgggcgccgatgcaccgccgtgcagttatgaagacttggaaaacagcgactgcgtgatgatcgtcggcagcaatatggcctacgcccatccggtattgttccggcgcctggagcaagccaaggcgcaacgcccgcacatgaaagtgctggtgattgaccctcggcgtactgacacctgcgatttggccgacctgcacttggcgatcttgccaggaacggatgtggcgttgttccacgggatcttgcatctgttgctgtgggaagactgggtggaccgcgcgtttatccaggcccacaccgacggcttggccgaactcaagcgcctggtgcatgactacacgccgcagatggtcacgcagctgtgcggtatcagcgtcgaacagttacgcctgtgtgcgcagtgggtcggcacctccagcagctttttgtcgctgtggtgcatggggcttaaccagtccaccgccggcagcgccaaaaacagcgcgttgatcaacctgcatttagccacggggaccattggccgcccgggttgtgggccgttttccctgaccggccaaccgaacgccatgggcgggcgcgaaaccggcagcctgtccaacttgctgccgggccaccgcgacgcggccaaccctgaacaccgcgctgaagtggcggcctattggggcgtggaacaactgcccgcgaccaccggccttaccgccatcgaactgtttgaacagatgcaggctggcaagatcaaggcactgtggatcgcctgtaccaaccctgcccaatccctgcccgaccagaacgcagtgcgcgccgccttggccgcgtgcccgttcgtggtgttgcaggaagcgtttcgtaccaccgaaaccgccgcctatgccgacctgctactgcccgccgccagttggggtgaaaaagacggcacggtgaccaactccgagcggcgtatttcccacgtgcgccgcgccatcaacccaccgggtgaagcacgcgcggattgggcgatcacggtggatttcgcccagcgcctggagcgccgtctgcgtccggggttgccgagcctgttcgcctttgaacaagcggcgcagctgtttgatgaattcaagccactgacccaaggccgtgacctggatatgtccggcatcagccatgccctgctcgaccggatcggcccgcagcagtggccctttcccgagggtgcccaggcgggtacttcgcgcctgtacaccgacggcattttccctactgacactgggcgggcgcgctttgtcgccgagccttatcgcgccgctaaagaacaacgcgatgcgcgattcccgttgaccctgatcaccggccgcctgcgtgatcaatggcacggcatgagccgcaccggcaccgccgcccagttgttcgggcacgtcagtgaggcgctgttgagcctgcatccggatgagctgcgccgccaccgcttcaaagagggtgacctggtcagcctgaaaagccgtcgcggcagtgtgatcgtcgccgtttgcagcgatgacagcgtgcgccccggccaagcgtttctgcccatgcactggggcgaccgctttctcaagggcggcgttaataccctcactcaaccggcgttcgaccctttgtccaagcagccggagctcaagcacagcggcgtgcgcctggaagcagtgcaactgccatggcagctgtttgcgctgatcgaaggcgatgtgcagcagcacttcgaagcgttgcgcccactgtgtgaaacctttgcctacgtcagcctgagcctggctggccgtgaacgccccgcgctgctggtgcgcgccgcgcataccgaggcgcccgacctgcaactgttgacccgcatcgaccacctgctgggcctcaacgacggcccggtaatggcctatgacgacccgcgccgctcaatcggcaaacgcgtgaaaatcgagaaaggccgcattaccgccctgcgcctggccggcgaaaccctggcccgtcactggctgcaaagcctgtggctggaaggccgggccgacgagcaactgcggcgctggttactggcgcccttgagcgcgccaccgggcggtaccacgaccagcaacaagattgtgtgcaactgcaagaacgtcagcgaaaacgccgtgtgtgccggtatcggcagcggcctggacctggatggcctcaaacaggcactgggctgcggcacccaatgcggctcctgcgtgccggaaatcaaacgtcttttggccagcaacccgcagccaatcgccatcagtgtgtaaggggaacaacatgagcgcaaaagtatggctggtaggcgcagggccgggtgatccggagttgctgaccctcaaggcggtccgggctctgcaggcagcgcacgtcgtgctgattgatgacttggtcaacccggcagtactggaacactgcgccagcgcccgggtgattaccgtcggcaagcgcggcggctgccgctctaccccgcaggagtttattcaccgcctgatgctgcgttatgcacgccagggcaagtgcgtggtacgccttaaaggcggtgacccatgtatttttggccgcggtggcgaagaggcaacctggctgcgcgagcgtggtgtcgaggtggaattggtcaatggcatcacctcagggctggccggggcgacccagtgtgacatcccgttgaccttgcgcggggtgagccgtggagtgaccttggtcaccgcgcatacccaggatgacagcagcttgaactggcgtgcgctggcggagggtggaaccacgctggtggtgtatatgggcgtggccaagctggacgaaatccgcgaacagctgctcaacggcggcatggctgcggatatgccggtggcaatgatcgaaaacgcttcattgccccaacaacgcgaatgccgcagctcgcttgcggccatgcatgaagctgcaacagcctttgcactcaaaagcccggccatcctggtgattggccaggttgccggcgccgcacagatggctagcatcgccgctgcggcaagcgcctgaggcaaatcgcaggcgaaaaaaagcccggcctgagccgggcttttctttactactcagtaattactgagcggtagcttcaaccgacgcttctacgcgacggttaacagcgcgaccagcttcagttgcgttgtcagcaactgggcgggattcgccgtaacctacagcagttacacggctaggagcaacgccgtctttaaccaggacttgcttaacagcgtcagcacgacgctgggacagcttctggttgtaagcgtctggacctacggagtcagtgtgaccagcaacttctacgttggtagctgggtactgagccatgaagtcggccaggtttttaacgtcgccgtagctgttaggcttaacaacggccttgtcgaagtcgaacttaacgtccagctcaacacgaacaacctgagcaaccggagcttctggctctggaactggctctggagctggtgctggggtaggagctggagctgctgcgccagcgttaccgccgaagttcacgcccaggccgaccagtgcggagtagtcccacttgccgttgtccagaccgtagtcagcttcaacaccagcacgagcgtacaggttgttggtgaagtagtacttcacgccggtaccgatggtagcgaaagtggtctgatcgcgaccggtgtggccgtcagcgcgcacgttgccacggctctggtggccgaaaccgccttcaacgtatggacgcaggctatcaacgccagcctgaccgaagtggtactgagcaacgaggctgccagtgtcacctttgatcttctggttgccagtgccgtcgttcgaacgggtgtggttggtcttgtcgtacgacagattcaacgacagatcgtcggtcaggaagtaaccaatgcgagcgcctgggttgaagccgtcttcgatgtgcttaacgctatcgttgtactgcttcttgtagaacagctcgccttcaactgcgccttggccttgtgccagaacgccgaaagaagtagcggcaataagagaaccaatggccaagcccaaggtgtttttcagtttcatccgttaaatccccatctggtgattgtaaagcagtcccacaaaccgggggacaactcggcgacaagtctaacagaacttgcctacacgtaagagatatttgctacgcactaagtttcagtctcgcccgcaaatttctcacgtaatttatcaagagcacgcttgtaccgcatttttgtagcactcaaacccatatgcatgatgtcagcgatttcctgaaattccagctctgcgacaaatcgaagcaccagaatttcgcggtcaatcgggttcacatgcaccaaccagcgatcaagtccgcccttttcctcgggtgccggcgccttctcttcagacgcctcctcaagggggtccagactcaaagcgtccatcaggcgacgctttcgccgttccttccgatactgcgtgatgcactcgttgtacgtgatgctgtacagccaggtcttgaacttcgatttgccctcgaagttcttcaggccgtatagcaccttgagcatcacttcctgacagacatcatccgcgtctctatcgttccccaaataccttgaacaaacgttgaacagagtgcgttgatacctgcgcatcaattcttcgtacgcgcgtgttacgtgaaacagctccgtgtgcgagcgcgcgaccaactcctcatcagagagctcacgggggtcatagcgcgtggacagcgtttgggctttattcaaaacaagtcgtgccgacagtcaggtcaatgtccgctgcaacccggtcacccgggtttgcggcggcgtacattagcaggatttgccggattagcggctactgacctgctgctccaggagaatccggttggacagcgacaccagttccccgtcatcggtcagcacggtcgtcttgactgtgccgatctcctcgatttgcccttcgacctcgcccacacgcacctgttgcccaacttgatacagctcacgcacatagattcccgcaagaatctgaccggcaatttcccggcttcccaaccccatggccagcgcaactgccagaccaacggtaatcaaaacaatcacaatcacgtggttgagcaggtcagttttgacctccagctggctgatcgcgacggaaatactgatgatgatcaccagcccctgggcaattcgtcccaggcccgctgcgtagtccaaccccacgccttcggcggccccgcgcaccagcccgttggccagttgcgcgagtaaaacccccaccagcagcaccagcgcgccgccgaaaactttcggcaaatacagtgccagcatgtcgagcgtagctgaaactcgctcaagtccaagggactgcgctgcagaaaccagaaaaataagtagaacgaaccaatagacgatcttgccgatcagagtcgaaatcggtacttgcaaccccgcgcggccgagcaatttggtcaggccagtgccagccatcaggcgatcgagccccagtttggcgagcaatttggacagcagggtatcgagcagcttggccacgacaaaacccagcaataccaggaccagggcaccaaacaggttgggaatgaaattcgccaccttggtccacaatgcggtcatcgcggtgaccaggctctgggtccagagatcaagttccatattcaatcagccttatcagcagtgctagcaagaggtttacgacgggaaaccggtgacacatgggccgaaccgttgttcagggccatcatcaatgccggcacccaacgcccgagcagaccgaacaggtcacccgcccctacctgacggttggcggttttcagtacgcggcccaggcaagcatcgtcatcacggttggatggcgaagcattgagcatgtcacgcaaagactgttcgaacggatcgtgcatagagacctctcgcaagtgatttaaaagacgagggtaaaattcatcgggtcacatcggccctttcttacgttcaggtcatattcaggtcaaacccagcgcaatcgtcgaaataaccaccattgccccaatgccacagacaccatcaacaggcacgcaatcatgaatccataaggactggcagagaacggaatgccgcccacatttataccgagcagaccggtgagaaaactcatcggcaagaagatcccggtgatgatcccgaagcggtacatggtgcggttcatgcgcaggctcaaacgccggtcttcggcctcaagcacaagccccacgcgctctctggccaattccagctcttccaggtaacgggtcagactgttgtgcagttcgttccaatagtcggcatcgtcgtcgcagaaccacgccaatttgattcgtgtcagctgggcgaaaatatcccgctggggggccaggaagcgcttgagtccggcggctcttcgacggatctgcagaacgctgccgtgctccggagtataccgttcgtcggcatcgagtttttcttcctcggaatcgacgatttcagacaagccggcgaccagatcctgcactttgttggtcaggtactgagccatataaaggatgagttcagacgccgtcttggggcctttgccgtctgccagttgcaccagcaactcatcggtagcgcgcaaggggcgcaaacgcagggaaatcactcggttggcggcagcgaaaatgcgcaccgacaccatgtcttccggctccgcgcctgggttgagattgatcccgcgcagaaacagcagcaattcggcgtccggcagcggcaacaggcgtgggcgagtgttctcctccagcagcaggtcacaggcaaactcgctcaggccgctggatttacgcagccaggtctgggtttgaggatggctgcgatcccagtgcagccacaggctttcctggggctgcaactgcagatcgtcgagctcagtccgggcaatcgaacgcgcaccgcctttaccgtccagcaccagggcatgcaccagcccccattgcgcgttttcttcttcgaacatcctcaccccgatcggttgcggcagtttattcaggcattttcagcgggctgggtgacacgatcaccccgttgttgtcggcgtaaatgtactcaccggggcggaacgtcacgcccccgaatgtcaccgccacgttcaggtcgccaaggccgcgcttgtcggtttttttcggatgcgaggccagggcctgcacgcccaggtcggtctgggcaatgacgtcgacgtcacggatacacccgtagatgaccagcccttcccaaccgtttttcgcggctttctcggcaatcatgtcacccagcagcgcgcagcgcagggaaccgccaccgtcgaccaccagcactttaccagcgcccggcaggtcagcctgcgccttgaccagggagttatcctcgaagcatttgagggtgactatctcgccgccaaaggagtctcggccaccgaagttgctgaacatcggctccactacctgcaccagctccgggtaggcgtcacacaggtcgggggtcacgtaatggttcatcgagaaactcctgtcatcaaagaagaggtcgaacatccacggtgtacatcaagaaaacgcctcgcgacaggcattctttaagtgcctgctcgttggcggcggccatgatcaaaccccgatcagcgcaacgcaatacacgttacgcgactgaatatgaccagaagcgcctggcgcgtcatatcttagccgcaacccttcaagagtgaaacgcccctggcagagcgtttcgtcaaaccgttgcagccacctcgggctgcgtgccgaataaaggtgtcagcgggtcgttcaaccaacgctcgaccaaaggccacacttgggcctgggcggctttgctgaccagcatctgcacatggccgaaatcctcgctgaaaccttgctgacgccccaggcacaggtactggcgatgctcgctgcccacttgctcgaagagcttgcggcaggcccagtccgggtcttgtcggtcgcccgctgcgctcaccgccaacagcggcacatcgacctgcgccaagcctttccaccagtcatgctcggcatcgccaaaccggccgaacaggccgttccaacgcatcgcttcgatcatcacgccagccggttcgtcctcgggcccacgcttgaagcgcgggccggacaggtggccaaggcgcttgagaataaagcgcccaccccactgcaccggtgggattttcaacggccaatgggtacgactgacctggcagccgaacaacgccaccgatgccaccgcagatgcatccaagtgctgcccgcccaaggccgcagccaaggtggtggcgccgagggaatgcccgagccagtgcggaacctgcccgctttgctcagacacaaacgcccccacagccggcaaatcgtagcgtgcgtaatcggcgacatggtttctggcgtagtcgtgattgcgcttggacaagccatggccgcgcatttccgggatccacacatcaaatccgcgacgcgccaggtatgcccccaggccgatgcccttgggcgagtaccagaagcgccggttggaaaagctgccatgcaataaaataatcggcgtgccccggttttccgggacatcggccaggcccaaacgggtcaccgccaactcgacggtgccgtccgggctgttaccgggtttgagccgatagacatcttcactcaggtcgccacgacgttcagcgctgatcagggcgacaggaaatagattgctgctgctttgcataatgctcttgcacaaaaaagggcggcgtccgcaaggattcccgccctgtacagataagaatgccggtcacccgcaacgagtgaccggcacttttgaccaggcgatcttaggcggacgcttggccttcagccaggaagaaccaggtttccagcacggaatcggggttcagcgaaacgctctcgattccctgttccatcagccatttggccaggtcagggtggtccgaagggccttggccgcagataccgatgtacttgcccgccttgttacaggcctggatggcgttggccaacagcttcttgaccgccgggttacgctcgtcgaacaggtgggcgatgatccccgagtcgcggtccaggcccagggtcaactgggtcaggtcgttggagccgatggagaaaccgtcgaagaactccaggaactcttcagccaggatggcgttggacggcaattcgcacatcatgatcacgcgcaggccgttctcgccacgggtcaggccgttttcggccagcaggtccaccacttggctcgcttcgcccagggtgcgcacgaacggcaccatgatctcgacgttggtcaggcccatctcgttgcgcacgcgcttgagcgcacggcattcaagctcgaagcagtcacggaaggcttcgctgatgtaacgcgaggcaccgcggaagcccagcatcgggttttcttcctctggctcgtagagcttgccgccgatcaggttcgcgtattcattggacttgaagtccgacagacgcacgatgacctttttcgggtagaacgccgcagccagggtgctgatgccttcaaccagtttctcgacgtagaaacctaccgggtcgttgtagccggcgatgcgcttgtcgacgctttccttgatgtccagtggcaggccgtcatagttcagcagtgccttggggtgcacgccgatcatgcggttgatgatgaattccaggcgggccaggcccacaccggcattcggcaactgcgcgaaatcaaaggcgcggtccgggttgccgacgttcatcatgatcttgaacggcaggtcgggcatggcgtcgatggagttttgcttgatatcgaagcccagctcaccttcgaagataaagccggtatcgccttcggcgcaggacacggtcacgccctggccatccttgagcagttgggtggcgttgccgcaacccacgacggccggaatccccagttcacgggcgatgatcgccgcgtggcaggtacgcccgccacggttggtgacaatggcactggcgcgcttcatcaccggttcccagtccgggtcggtcatgtcggaaaccagtacgtcacccggctggaccttgtccatctcggacacgtccttgatgatccgcaccttgcctgcgccaatgcgctggccaatggcacggccttccaccagcacggtgccggtttccttgagcaggtagcgttccatgacgttggccgaagtacggctcttcacggtctcggggcgtgcctgcacgatgtacagcttgccgtcgtcaccgtccttggcccactcgatgtccatcgggcacttgtagtgcttttcgatgatcatcgcttgtttggccaactcgctgacttcagcgtcggtgaggcagaaacgcgcgcgctcggccttgtcgacgtcaacggttttaaccgagcgaccggccttggcctcgtcgccgtagatcatcttgatggccttgctgcccaggttacggcgcaggatggccgggcgacccgcttcgagggtgcccttgtgtacgtagaattcgtcggggttgaccgcgccctgtacgacggtttcgcccaggccgtaggcgccggtgataaacaccacgtcacggaaaccggattcggtatcgagggtgaacatcacgccggccgtgccggtttccgaacgtaccatgcgctgcacgccggcagacagggccaccagcttgtggtcgaaaccctggtgtacgcggtaggaaatcgcacggtcgttaaagagggaggcaaacacttccttggccgcgcggatcacgttttcgacgccgcgaatgttgaggaaggtttcctgctggcccgcaaaggaggcgtccggcaagtcttcggcggtagcagaggaacgcacggcaacagccatgtccgggttaccggccgacagggtggcgaaggcggtgcgaatttcttcgttgagcttctcggggaactcggcttccatgatccactggcggatctgggcgccggtcttggccagggcgttgacgtcatcgacgtccagggcgtccagcgcggcgtggatctgggcgttgaggccgctcagctcgaggaagtcgcggtaagcctgggccgtggtggcgaaaccaccgggcaccgagacaccagcgcctgcaagattactgatcatctcgccgagggatgcgttcttgccccccacatgctctacatcatggacgccgagcttatcgagggaaactacgtactctaccaaggtgatctctccactttctgtgttggaaaagctcaggacgcgggttgctcagtaggagctaacgccagcgcttgtggcctggacctggaaaataagtgagaatgcggcccactgcgggacggcaaaatcgcgcctatcatatccaagattcgccatcagcttaaggcccagggctcaaatgaaacgatctgctttctttatttccgacggcaccggcattacagccgaaacattgggtcagagcctgctcgcgcagttcgaaaacattacctttgccaaattcacccggccttatatagacagcgtggataaagcgcgggccatggtacaacaaatcaatctggcggctgaaaaagacggttttcgcccgatcattttcgacaccatcgtcaatcaagacattcgtgagattctcgcaacgtcgaatggtttcatgatcgacattttctctaccttcctggcgccgctggaacaggagttgagtgaacattcgtcctattccgtcggaaagtcccactccatcgggcataactccaactatatggagcgtatcgaggcggtgaacttcgccctcgacaacgacgacggcgcccgcacccactactacgacaaggccgacctgatcctggtgggcgtatcgcgttgcggcaagaccccgacctgcctgtacatggccatgcagttcggtattcgtgcggccaactacccgctgaccgaagatgacatggaacacctgaccctgcccgccgctttgcgcgcgcattcacacaagctgttcggcctgaccatcgacccggaccggctgaccgccatccgcaacgaacgcaagcccaacagccgctactccagctatgcccagtgtgaatttgaagtgcgtgaagtagaaaatctgttccgccgcgagaatattgcgcacatcaattccacgcatttttcggtggaagagatttcggcgaagattttggtggagaagggtgtggagcggcgcttcaagtgatctctgtcgcctgatctgatcgttcccacgctctgcgtgggaacgccgcctgggacgctccgcgtcccgcaatagcgacgcggagcgtcgcaagatgcattcccacgcagagcgtgggaacgagcaacggtaacgcggatttacagatgaaaccgcccgcctccctgccccaacgccgtcgccagcgcatcaaagccctcgcgcagtaactgatcatcgcccgacgtgttgcagatactcgcccgaataaactgcggcaccgccgtctgccccacggcaaacgcctcggcggtggcgatcaggtaattgttctgcttgagctccgcctcgatttccgaggcccgccagggctccggcacttcgatccagaagtgcgggctgttgaagtgggtgcgataagccaggccggtcaatagatcttcgaccaacgtcttgcgccggctgatctcgttgatctgctgacgcaacaaatattccgccgtgccgttttcgatccactgggtcgccagttccaaggtcacaggtgtggccatccagcaggtcgaacggatcgccgccgagatgcggctgaccagcgcaggtggcgcatgcacgtagcccacccgcaaaccggctgacaccgccttactcaggctgctgatcaagatcgtacgttcaggcgcgaaatagctgaggggcggcggacggtcctccaccagcacaccgtgggcttcgtcctccagaatcagcaggttatgttcgcgacacaccctggccaaggcttcgcggcgcgcaaccgataacacggcggtggtcggattctggatagtcggcgtgcaatacaacgccgaaatccggtgattacgacagacctcatccagcgccgtgggcagcacaccctcctcgtccatctccaggccgatcagccgcacccccagcatgcgcgcagcggtaatcagcccggggtaagtcaattgctcggtgaccaccgtatcgccagcgcgcagcagggccatcatggcgcacagcaagccgtgctggccgccgttgacgcagatgacctgctcgggaatcggatgaaactcgcgctgcaccagccattgcgcgcccgcttcacggtaacgcggcaggccggcgtccggggtgtaggcgctgatgtcctggaggaacttggcgttggtcgacagggtttgaaagctctgggcgagaaacaccgtctcttgcccgggaatgtgcatgttgcggctcatgtcgaagtactggcgcggctcctcgctgaaattgcgaaagccctcatcacgctggcgctccatcccacgcttgcgcacgaaggtgccgtcaccgacccgtgcaaccaccaggcccaggcgctccagttcaccgtaggcccggctgatggtgccgatggtcacgcctaaattgtcggaaagcacccgatggggcggcagttttcgtcccggttcaatcaagccttcaaggatgccccgttccatcacatcggacaggcgcttgtacttcacgccctgcccgttggacaagccctcacgcataattgacaccatgtcaatatttgttttgacagccatctttcgccctaatagtgtgcttttacgggttcaatcgccgataaacataactcattacaagttcaatatagagttcaattccggctcagggaagcaataaacgatgccaatgtccgccgttctcgaaaacactgcaaaaacaaaaacgcaaaaacagtggctcgccgggctggtgaccagcgtgatgttcctgatcgtttgcctgagctggggcactacttggctgggcatcaagatcgccgtcgagagcgtgccgccgctgacatccgccggcctgcgctttctcatcgcgtttccgctgttcctgtgttttgccatggtgcgccgtgagccgatcctgtttccccgggaaagccgctggttcttcgtattcgtgaccctgtcctacttcagcgttccctactatttgctcaattacggcgaaatgcatgtgtcgtcgggcctcaccgccctgctgttcagctgcatgccggtgttcatcctgatcttctccgcgctgttcctgcgcgagcgcatctatttctcccaggtggtcggcatcggcatcggtttcggcagcctctacatgatcatcaggagccagggcctgcacctggaccacgccgagttcctcggggtgctggccattctgagcgccgcgatcatgcacgccttgtgctatgtcattaccaagcaaaaaggcagcgccatcagcgtcatcacctacaacaccctgcccatcggcattgccgggctgatgctgttcctggccggcctgtggtttgaaacgccgacgttcgacgccatcaccctgcgttcctggagcgcgctgttctacttgggcctggtggcctcggtgggcgggttcattgtgtatttcatgctgctcaagcgcctgagcccgatcatcctgtcattcgtcttcatcatcttcccggtgttcgcggtcatcatcggtgcctggtacgaaggcgtggaaatttcccgcgacctgatgctgtattcggcgatcctgctggccggctttgcgatcaccaagttgcccatcgaaaaactcatggccaagaaaaagtgaccctcaaccaacgcgagagaaacatggacgtcctccgccccaccgccctggaacagatctacgcccacgccagccgcagctaccccgaggaatgctgtggttttgtcttcgccgacggcagcgtgtacctgggcagcaatatccagaatgagctgcaccgcaagaacccccagatgtacccacgcagcgcggccaacggctacaccttttcggtggccgacaccctgctgatgaacaaggcgtttcgcagcgacaacccggtggtggtgatctaccactcacacccggatgtgggcgcctatttcagtgacgaagaccaggacaaggcactgttcctgggcgagccgatcttccccgtcagttacctggtggtggatgttcgtcagggccaggccctgggctccaagctgtttgcctgggatggcaagcatttctcccttcaacctttcaacgacctgcacacggagttgtccatgaacgctgtctctttccccgacattctggttcgcgtggccaagctgccggaatcgacccttgagggcgccggatcgacattgcgcgaagtcattgaaaatctctgcacccatcacccccaattgcgtcagcacctgttccatgaaaagaacgaccagctcaaggaacacttcctgtttaccgccgaggaggcgctgatagacgccgatgaacccctgccagcaaaagcccggatcgaagtattgctcgccacctccggcggcatggacatcgacaccctgagcaacgaagaagtgcagcgctatgtgcgccacatcaccctgccgggcgtcggccgcgagggccaattgaacctgaagaaagccaaggtgctggtcatcggtaccggcggcctgggctcgcccatcagcctgtacctggcggcggccggcatcggcaccctgggcctggtggactttgacgtggtggaaagcagcaacctgcaacgccagattgtgcatggcaacagcaccctgggcatgcccaaggtcgagtccgccaagcagcgcctgctggacctcaacccctatatccagatcaatgcgcacaacaccgcgctcgacactgacaacgccctggaactggtgggtgcctatgacctggtgatcgacggcaccgacaatttcgacacccgctacctggtcaacgacgcctgtgtgcagttgggcaaacctttggtgtacggcgccatctaccgtttcgacgggcagatcagcgtgctcaactataaaggtgggccgtgctatcgctgcctgttccccaaggccccgcccgctgagctggcgcccaattgcagcgcgggcggtgtgatcggcgtgttaccgggcgtggtcggcatgatccaggccaccgaggcgatcaaattgctgatcggcattggcgaacccttgtccggccgcttgatgcgcttcgacgcactggcgatgaagttcagcgagatccgcttcaagcgccgcgccgactgcccctgctgttcagacctgcgccacagcgaaaccgtcgcgccggccacctgcgccgatgccttaccgagccagccctccctggccgcggaacgctacatcaagccccaggtgctcaagcaagtgctcgaacaccctagcagcgccgatgtattgctggacgtgcgtgacgccagcgaactggaagtgtgcaaattaccgggcgtggtgcatatcccgctggcagaactggatgggcagctcgccagcctgagccgcgacaacacccactacctgatctgctacgcaggcgcccgtgccgagcaagccgccagcaccctgttggcagccggctttgccaacaccaaagtcctgcagggtggcatgaaacattgggttcgcgacgtcgaacctgacatgccgctgtactgagagtggggacgtactgatgctgcataactccattctcgacgtgatcggccaaacgccgatcgtgcgtctggcccagttttccgaagacctcggcatcgaggtctacgccaagctggagtcgctcaaccccggtggcagccacaaggcgcgcatcgccctgggcatgatcctggatgccgagcgccgcggtgtgctgatccgtgattccgggcagaccatcatcgaacccagtggcggcaacaccggcattggcctggtgatggccggcaacgtgctgggctacaaagtggtgctggtgatccctgacaactacagcccggaaaaacagaagctgctgcggctgtacggtgccagggtagtgctgtccgacagtcgcctgggcaataactcccacggcgaaaagtgcatggagctgcagttggaaaaccccaactacgtgatgctcaaccagcaacgcaatggcgccaacccccaaacccaccgcgacaccaccgctccggaaatccttcgcgccttcggtgaacagcgcgtggactacttcgtcagcggcattggcaccgggggccatatcaccggtatcggcgaaaccctcaaggccgcctggcccgcgctgcgagtgatgggcgtagaaccggaagaatgcgacctgctcaaagaccggcacgcggcgcacgggatccagggcctgtcgatcggcctgatccccagcatcctcaacctggacgtgatcgacggcatgctcaaggtgtcgcacgccgattgcctggacatgatcaaacgcatcatgcgcaccgatgccatcagcctggggctgtcttcggccgccaacatggttgccatcgcccaacttgcccccgaactgccgcctgaaacggtggtgttgaccatggtctacgacaatgccgacagctacctgcccagtttcgaataaccgggcttttaaccattcaacatacgggggtgtctccatggggggctttatcgacatgcaacagctgcacgatgagttgctgacccacctcatcaccaccctgacgcccgggcagatgaagcagctggaaccgcacctggcgccgttgatccagaacgccgcccaggcagtggccgaagacctgatcgcctatgcctatcgggacccggcgtcccgtggccgcggtgagttgatcctggaatcctacgcctcgttcaaggccgtactgttctaccgtcttgcgcacctggtgtggcatttccaggccgctgacaacggcgagttttcgcgcatggccctcaagctgagcaaccagggcaagatcctctccggcgccgagattcacccggcagcgcgtattggccggcgctttgtgctggaccatggctacggtaccgtcatcggcgaaacctgcgtgatcggcaacgactgctacatcctctgcggcgtgaccctgggcgcgcgcggtatcgccaacaacccggacggcaagcgccacccgcgcctgggcaacaacgtcgaagtcggcgccggcgcccgggtgctgggctatgtttcgatcggcgacaacgtgtttatcagcccctcctgcgtgattacccaggacgtgccggcaggcaccaaggtcaaggtggtcaaccagatccaactgcaaaaaaacgatgaatcggaccacagcaactacctcggcgcctttgccctggatgagcgcttgcacgtggtgggcgaagtgagtgtcggccacaaggtcaccgtgctggacgccgactttcatcccctgcaagggctgatgctcgaacccacggtgaaagagcggcaccacctgcagtttcgtctgcgtcgcctcgacaacgacgaacaactgccacgcctgccgctgaacctgaaggtgtgcgggccggaatttgaaatcaccctgctctctccccctggcttgagcgcactggtgcgccacctcttgcaagccaccccattgatcgtcggaggttgaacatgtctgtgcataccatggaaaccctggcgctgttcgacagcgcgccctaccagaacgccttcagcgcccgggtgattgccgtcagcgaacagggtatcgccctggagcacaccctgttctaccccaccggcggcgggcaaccgggcgataccggccacctcaccctggccgacggcacacgggtgcaagtgaccggcacggtgcgcgacccggtgttgcgctcgatcatctggcatcaggtggaccactgccccgaacagttggccgctggcgtccagatcgacgccgggctggattgggagcggcgctaccagcacatgaagatgcacacttgcctgcacttgctgtgttccctcatcgacgcgcccgtgaccggttgcagcatcagcgcagataaaggccgcctggatttcgacctgccggagatgaccctggacaaagacggactcacccgtgacctcaacgccctgatcgagcaggcccacgcggtaaaaaccctgtcgatgcccgccaccgagtacgcgaccctgctgcagatcacccgcacccaggcggttgcgccgccggtggtctcgggttcggtgcgggtgattgaaatccccggcatcgatatccagccctgcggcggtacccatgtgctcaacaccgaggaaatcggccgggtgttctgcgagaagatcgagaaaaagagcaagcacaaccgccgggtgatactgcggtttgaatagattctgaagcagaaacttcagtcaactgtgggagctggcttgcctgcgatagctgacatccagtcaattcatgtggggctgacacaccgctatcgcaggcaagccagcccccacagcgaccgtgctgtttttcagatcgtgaacaggtccatgaaacggttcacaggtgtcgcctcaagccgcgcctggtccttgcacagggcgacaatctcagcgctgcgttgcgcggtaaaccgcgtggccaggttggccttgaacttgtcttccagcagtggaatgccatccacccgacggcggcgatggccaatcgggtactccaccgctacctgctcggtgcaggtgccgtccgtgaaaaacacctgcaccgcgttggcaatcgagcgtttgtcggcctccaggtattcgcggctgtagcgcgggtcttcgacgatgaccatcttgtcgcgcagctcatcgatgatcgggtgggccgcgtggaaatcatcttcatactgctcggccaccaggttgccgaacgccaagggcacggcggtcatgtattgcaggcagtggtcgcgatcagcggcgttggccaatgggccaaccttggaaataatgcgaatcgccgactcgtgagtagtgatcacgatacggtcgatttcatgcaaacgatgcttgacctgcgggtgcagggcgactgccgcttcacaggccgtttgcgcgtgaaactcggccgggaagctgattttgaacagcacgttctccatcacgtaggtgccgtagggttggggcaggctgaaggcgcggttgtcctcgggcttgagcgccaggtccttgttggtgtggctgaacagcacgtcgtagaagccccattgcggcgcactcagcacgccggggatgcccatttcgccacgcaaggcgatgtctgccaggcgcacgccgcggctcgatgcatcgcctgccgcccaggatttgcgcgagccggcattcggcgcatggcgataggtgcgcaacgcctggccatcgacaaaggcgtgggacaacgccgatagcagttgctcgcggttggcccccatcagcttggcggtgaccgccgtggaggcgactttcaccagcaacacatggtcgagacctacccggttgaaggagttctccaaggcaatcaccccttggatttcgtgggccatgatcatcgcttccagcaccgcacgcacagtgagcggcgcgtcgccattggccaggcgcttttgcgacaggtgatcggccacggcgaggatgccgccaaggttgtccgaagggtggccccattcagcggcgagccaggtgtcgttgtagtcgagccagcgcacgatgcaaccgatatcccaggcggccttgaccgggtccaggcgaaacgaagtgcccggcacccgtgcaccgaacggcaccacggtgccctccaccatcggccccaggtgcttggtgcactcggggaagcgcagggccagcaggccacagccgagggtgtccatcaggcagttgcgggcggtgtccagggcgtcttgggagtcgatgcggtagttgaggacgtagtcggcgatgtcctgcaacaccgggtcgtagtcgggacggttgttctggtcgacgttggcgctcatggcagttctcctaaaagttggttgttccatcctcagggtcagggtttgatcgttcccacgcggagcgtgggaatgcatcccgtgacgctctgcgtcacagcaggacgcagagcgtcccaggcggcgttcccacgcggagcgtgggaacgatcaagctagaaagcgtcgccggggatgcgcacatagccttccattaacacccgtgcgctgcggctcatgatggctttcttcaccacccattcaccgtccacctggctggcctcggcgccgacgcgcaaggtgccggacgggtgcccgaagcgcacggcattgcgctccacgccgcctgccgccaggttgaccaaagtgccggaaatcgccgcggcggtgccaatcgccaccgccgcagtgcccatcatcgcgtggtgcagtttgcccatcgacaaggcgcgcaccagcaaatccacatcgccggccttgatcgccttgccactggaggccacgtaatcggcaggcttggcgacgaacgccaccttgggcgtgtgctggcgctgggcggcctcgtccaggtgtttgatcaggcccatgcgcaacgcgccatacgcccgcacggtctcgaacatcgccagggccttggggtcgctgttgatcgcgccttgcagctcggtaccggtgtagcccaggtcttgggcattgatgaaaatcgtcgggataccggcgttgatcaacgtggccttgaaggtaccgacgccgggcacctccaggtcgtcgacgaggttgccggtggggaacatcgagccaccaccgccctcttcttccgccgccgggtccatgaattccagctgcacttcggcggccgggaaggtcacgccgtccagttcaaagtcgccggtttcctgcaccgcgccgtcagtgatcggcacgtgggcaatgatggtcttgccgatgttggcctgccacacccgcaccacggccacgccgttatggggtacgcgggccgcatcgaccaggccggcactgatggcgaacgagcccaccgccgccgacaggttgccgcagttgccactccaatcgacaaatggcttgtcgatggagacctggccgaacaggtaatccacgtcgtgatcggcgcggctgcttttggccaggatcacggtcttgctggtgctcgaggtggccccacccatgccgtcgatctgcttgtcataggggtcgggactgccaatcacccgcagcaacaaggcgtcgcgtgcagggcctggtacctgcgccgctgtgggcaggtccttaaggctgaagaacacgcccttgctggtgccgccacgcatgtaagtggcggggattctgatttgcgctacgtgtgccatggttatcctcttcaggcggttgcctttgattccaggaagtcctgggcgaaacgctgcaacacgccacccgcctcgtagatcgacacttcttcggcggtgtccaggcggcacgtcaccggcacctcgacacgttcgccattcttgcggttgatcaccagagtcagctgcgcacgcggggtgcgctcgccgaccacgtcataggtttcactgccgtcgatcttgagggtgtggcggtcggtgcccggcaggaattccaggggcagcacgcccatgcccaccaggttggtgcggtggatgcgctcgaagccttcggcggcaatcgcttccacaccggccaggcgtacgcccttggccgcccagtcacgggacgagccctggccatagtcggcgccggcgatgatgatcagcggttgcttgcgctccatgtaagtctcgatggcttcccacatgcgcgtgaccttgccttccggctcgatacgcgcaagagagccctgcttgaccttgccgttttcctgcaccatttcgttgaacagtttcgggttggcgaaggtggcgcgctgcgccgtcaaatggtcgcccctgtgggtggcgtaggagttgaagtcgacttccggcaagcccatcttcgccaggtattcaccggcggcgctgtcgagcatgatcgcgttggacggcgacaagtggtcggtggtgatgttgtccggcagcaccgccagcgggcgcatgcctttgagcggccgtgcaccggccagcgcgccttcccagtacggcgggcggcggatataggtgctttgtgggcgccagtcgtacagcggcgtgaccttggggccggtgtcttcgtggatggcgaacatcgggatatacacggcacggaattgctcgggttttaccgaagccttgaccaccgcgtcgatctcttcatcgctcggccagatatcctgcaggcggatctccttaccatcggcgtccaggccgagcacgtccttctcgatgtcgaaacggatggtgccggcaatcgcataggccaccaccagcggcggcgacgccaggaaggcttgcttggcgtaagggtgaatgcgcccgtcaaagttgcggttacccgacaacactgcggtggcgtacaggtcgcggtcgatgatctcttgctggatcaccgggtcgagcgcgccggacatgccgttgcaggtggtgcaggcaaaggccaccacgccaaaaccgagtttttccagctcatggccaagtcccgcttcttccaggtacatggccacggttttcgagcccggcgccaaagacgacttgacccacggcttgcgggtcagccccagcttgttggcgttgcgtgccaacaggccggcggcgatcacgttgcgcgggttgctggtgttggtgcagctggtgatggcggcgatgatcaccgcgccgtcgggcatttgccccggcacgtcatcccattggccagcgatgccttttgacgccaggtcgcgggtggccaggcgggcatgcgggttgctcgggccggccatgttgcgcacgacgctggagaggtcgaagctcaggctgcgctcgtactgcgcgcctttcaggtcgtccgcccacaggccagtgtggcgtgcatattgctcgaccagggcgacttgttcgtcttcgcggccggtgagtttgaggtaggcaatggtttgcgcgtcgatgtagaacatcgcggcagtggcgccgtactccggggccatgttggagatggtggcacggtcacccaaggtgagtgccgcagccccttcgccgaagaactccagccaggcgccgaccaccttctgctggcgcaggaactcggtgagcgccagcaccatatcggtggcggtaatgcccggttgcagcttgccggtcaattccacgcccacgctttccggcaggcgcatccacgacgcgcggccgagcatcacgctctcggcttccaggccaccgacgccgatggcgatcacgcccagggcatccacgtggggcgtgtggctgtcggtgccgacacaggtatccgggaaggccacaccgtcacgcacctgaatcaccggagacattttctccaggttgatctggtgcatgatgccgttgcccggcgggatcacatcaacgttcttgaaggcctttttggtccactcgataaagtggaaacggtcttcgttgcgacggtcttcaatggcgcggtttttttcgaaggcttgcgggtcaaagccaccggcctcgacggccagggagtggtcgacgatcaattgggtgggcaccaccgggttgacctgcgccgggtcgccgccttgctgggcgatggcatcacgcaagccggcgaggtcgaccagggcagtctggccgaggatgtcatggcacaccacgcgggccgggaaccacgggaagtcgaggtcgcgcttgcgctcgatcagttggctcagggatgcgtcgagggtggccgggtcgcaacggcgcaccaggttctcggcgagcacgcgcgaggtgtagggcaacgtggcgtaggcgccgggcgtgattgcctcgacagccgcacgggcgtcgaagaaatccaggcggctgccggggagcggtttgcgaaattcagtgttcatcgtcaggactcggtcacggtaagttcgaaaggtgaactgtcgacactggctctgtttcctgtgggagctggcttgcctgcgatggcatcactgcggtgtgacaggtacaccgaggtgatgccatcgcaggcaagccagctcccacaaaaaagcacattagccagcgggcacagcccatcccattcagcgacgttcgattggcacgaacttgcgctgctcaacgccggtgtactcggcgcttggacggatgatgcggttgttggcgcgctgctcgaacacatgcgcagcccagccggtcaggcgcgagcacacgaagatcggcgtgaacagcttggtcggaatgcccatgaagtggtacgccgaggcatggtagaagtcggcgttgggaaacagctttttctgttcccacatggtcttgtcgatggcttcggagaccgggaacaacacggtgtcacccacttcgtcagcgagttttttcgaccagcctttgatcacctcgttgcgcggatcgctgtctttatagatcgcgtggccaaagcccatgatcttgtctttgcgcgccaacatgccaagggtgccttcaaccgcttcctgggccgaggagaaacgctcaatcatttccatcgctgcttcgttggcaccgccgtgcagcgggccgctcagggagccgatggcagcggtgacgcaggaatacaggtcggacagggtcgatgcacacacccgtgcggtgaaggtcgaagcgttgaattcatgttcggcgtagaggatcagtgacacgttcatcactttgacgtgcagctcgctcggtttcttgccatgcagcaggtgcaggaaatggccgccgatgctcggctcgtcggtcacgcagtcgatgcgctggccgtcgtgactgaagcgataccaatagcacatgatcgccgggaaggcggcgagcagacggtcggtgacatcgcgctgcacgctgaaatctttctcgggctcgatattgcccaggaacgagcaaccggtgcgcatcacgtccatcgggtgggcgtcggcggggatgcgttcgagcacttctttcagggcttggggcaggtcacgcagtttgctcagcttgttgctgtaggcgtccagttctgcctgggttggcaattcaccgtacagcagcaggtaggcgacttcttcaaactgggcgtcggcggccagttcgcgcacgtcgtagccacggtaggtcaggccagcgccggcctggcccacggtggacagtgcagtctgcccggcgacctggccacgcaggccagcaccactcaatactttcgcttcagccatgttcgttctccaattttgtagttgttcagggaaccacagggtttattttttcgcggcaaacagcgcgtcgagcttctgctcgaaggtgtggtagtcgatgcgatcgtaaagctccatgcgcgtttgcatggtgtcgatcacgttctgctgggtaccgtcgcgacgaatcgcggtgtagacattctcggcggccttgttcatggcacggaaggccgagagcgggtacagcacaatggaaacatccgcagatttcaactgttcggtggtgtacagcggtgtcgcgccgaactcggtgatgttcgccaggatcggcgccttcacgcgggaggcgaacagcttgtacatctccagttcagtgatggcttccgggaacaccatgtcggcaccggcctcgatgcacgcggcggcacgttccagggcagactccaggccctcgaccgccagggcgtcggtgcgcgccatgatcacgaagctgtcatcggtgcgcgcatccacggcagccttgatgcggtcgaccatttcctgctgggacacgatttctttgttcgggcggtgaccgcagcgcttggcgccgacctggtcttcgatatggatggcggcggcgccgaacttgatcatcgacttgacggtacgcgccacgttgaacgccgaggagccgaaaccggtgtccacgtccaccagcagcggcaggtcgcacacgtcagtaatgcggcgcacgtcggtgagcacgtcatccagaccggtgatgcccaggtctggcacgccgagggagccggcggctacaccgccacctgacaggtaaatcgccttgaagccggcgcgcttggccaagagcgcatggttggcgttgatggcgcccaccacttgcaagggctgttcgctggcgacggcgtcacgaaaacgctggccgggagtgctgttgttgttggaactcatgactcacctcgtgatgaaggcgcaccgtccgggaagtgacgggcaatgttgcgtttggaggcgccgatatgccggcgcatcaacagttcggccagttcaccgtcgcgatcggcaatcgcgtccagaatgcggtgatgctcggcaaaagcctggcgtggacgattgggggtggcggagaactggatgcggtacatgcgcaccaattggtacagctcgccgcagagcatttgggtgagggtgcggttaccggcgccttgaatgatgcggtagtgaaaatcgaagtcgccttcctgctggtaatagccaacaccagcctggaacgccgcgtcccgttcgtgggtgtgcaacacctggcgcagttcttcgatttccgcgtcagtcatgcgctcggcggccaggcgacaggccatgccctccagggactcgcgaatttcatacagttcgaccaactcggcgtggctcaaagacaccacgcgcgcgccgacatgaggcacccgcaccagcaggcgctggccttccaggcgatggatcgcttcgcgcaaagggccgcggctgatgccgtaggtgcgcgccagctccggctcggaaatcttgctgccgggggcgatttcgcctttgacgatggcggcctggatacgccggaagacgttctccgacatggtctgggaatcgtccggtgccaccgctggtttttccagttgctccaacatattgtcgacaccttgaaaagcaatgccgcaaaaactagtcaattagccccgcatagtcaaagaataaatacacattgtcgacaatcgtctaataaccgcctcattcgcttgcgaaggcatggccgcctgccagcgctggcgccaaaaaagcatcatgttagaatgcccgccgcttttgcctgacatcagacgatgaaagagcgcacccgagattgcgcagcaatgccagtcgccatgaaatgaacagtgcactgccctgcctcaggatttatgagactcaagccttacctactagtgatgtgcctgctgtgcataccgagccttggcgctggcgccgagaagaccgtgtacggcctgaatgaatacgccaaacttgcaggtatcgacctggaagtggcggccaaactcgacaccggcgccaagaccgcctcgttgagtgcccgcgatatcaagcgcttcaagcgcaatggcgaatcctgggtccgcttctacctggccatcgacaccgcccattcccaccccatcgaactgcccctggcgcgtgtcagcaagatcaagcgccgcgccggcgactacgaccccgatgaggacaagaactacaccgcccgcccagtgattgcgctggatatctgcatgggcagtgctttacgcagcatcgaagtgaacttgactgaccgcagcgcattccaatacccgctgctgattggctccgaagcgctcaaacgctttgatgcgctggtcgaccccagtcttaaatatgcagcaggcaaacccgcctgcgccgccgacgcttaataccgccgagtaaaccgaatgcgctctctgaccctgcacctgaaaatcctgatcaccttgctggtggtgctgggcatttcggtcaccgcctatcagatcttcgtgctgggaattcccgtcaccgaagatgctaccgacgacttgtggaacatcgacgccaaggtcgagttcgtcgccaacccgaaagacccggtcaagatccagatgttcgtgccgcccctgagccgcgacttcgtcagcctcaatgaaagctttatctccaacaactacggggtgagcgtcaaccgcatcgacggcaaccgcaaggtcacctggtcggcgcgccgggccaagggcaaccagaccctctattaccgcctggtgctgaccaagcgctacagcggcgaaaaggtcaagatcaaaggcccgaccttccgcgacagcatcgccgtggaaggccccgagaagatcgccgccgaagccttgctggcgccgattcgccagcactcggccgacgtcgagacctttatcagcgaagccatcaagcgcaccaacaacctcaacgacgacaatgtgaagttgctgctggccggagacccctcgacgccgcacaaagccaaaatcgtcgagctgctgctgtccatcgcccacgtgccggtagagaaagtccacaccatccgcctggtggccgaccagccgcaaaccccggagctgtggctgcgcagtttcaacggcaacgactggctgtacttcaacccggagactggcgaacagggcctgcccgccgaccgcctgctgtggtggaccggcgatgaaaacctgatcacggtcgatggcggcaagaaggccatggtgaccttcagcctcaacaacagcgaaatgaacgcgattcgcctggccaagctgaccgacgaaaacaccgacgccaacttcctcgaatactcgctgtacggcctgccgctgcaaacccagcagaccttcatgatcatggtgatgatcccgattggcgtgctggtgatcctgatcctgcgcaacctgatcggcctgcaaaccttgggcaccttcacccccgtgctgatcgccctggcgttccgcgagacccagttgggcttcgggattgtgctgttcacgatcatcacggccctgggcctgtcgctcaggtcgtaccttgaacacctgaaactgcagatgctgccgaggctgtcggtggtgctgaccttcgtggtggtgttgattgccgccatcagcctgttcagccacaagctggggctggagcgtggcttgtcggtggcgctgttcccgatggtgatcctgaccatgaccatcgaacgcctgtcgatcacctgggaggaacgtggtgccaaccatgcgctgaaagtggcgattggcacgttgttcgccgcgtccctggcgcacctgatcatgagcgtgccggagctggtgtatttcgtgttcaccttcccggcgatcctgttgattctggtgggcttcatgctggccatgggtcgctatcgcggctatcgcctcaccgagctggtgcgcttcaaggcgttcctgaaggctgactcttgatgttcggcttctggaagacctggaaggccctggaagcgcgggggatcatgggcatcaaccggcgtaatgccgactacgtgctcaagtacaacaagcgcagcctgtaccccatcgtggatgacaagatcatcaccaaggaacgggcgctggcggcaggcatccacgtgccggaaatgtacggggtgatctccaccgagaaggaaatcgacaagctcgacgagattatcggtgggcgcagcgacttcgtgatcaagcccgcccagggcgccggcggtgacggcatcctggtggtggccgaccggttcgaggggcgctatcgcacggtgtccggcaaaatcatcagccatgaggagatcgagcaccagatttccagcatcctcaccggcctgtattccctcggcggccaccgcgaccgcgcattgatcgagtaccgcgtggtgcccgaccagatcttcaagagcatcagctatgaaggcgtgccggacatccgcatcatcgtgctgatgggctacccggtgatggcgatgctgcgcctgcccacccgccaatccggcggcaaggccaacctgcaccagggcgcgatcggcgtgggtgtagacctggccaccggcctgaccctgcgcggcacctggctgaacaacatcatcaccaagcaccccgacaccaccaacgccgtagatggcgtgcaactgcccaactgggacggtttcatgaagctcgccgccggctgctatgagctgtgcgggctgggttatatcggcgtggacatggtgctggaccaggaaaaaggcccgctgatccttgagctgaacgcacggcctgggctgaacatccagattgccaacgactgcggcctgacgttgcgcacccatgcagtagaggcgcggctggaagaactcaaggcggccggggtgacagagaccccagaggaacgggtgaagttcgtgcaggagatgttcgggcatattccgcccgtggaaggctgatccggtcttcgaactgtctatccccgacatcccctctaggagcaaatcctacaggggactacaatccccctcccccgcgccattggctgatccacccccgcatgtcgacctgttccgtatacccgttgccctaccgggccaatcccgccgagttctttgcggtcattcgccacgcccctggtgcggtgctgctcgacagcggccgcccgatggctgttcgcggccggtatgacctgctcagtgcctggcccgaagcgatcctgacggtagggccggacgaaagtggcggtgatttcctgcaacgcttgcgcaagaacctcacgcagttaggtcaagcgacgttgcctgatggctatgacttaccgtttgccggtggtttgatcggttacctgagctatgactttggtcggcacctggagcagatttcacacctggccgtggacgatttgcatctgcccgatgcgcgtttcgggctctatgcctgggcgctggtcagcgatcaccaggtgcaaaccagccagttggtctttcaccctgcgctggccgacagcgagcggcaacgcttgatcaacgtgttcagtcaggcacaaaacgatgcgccgacgaccttcaagcttcacggccccatgatcccggacctcagcgccgaggcgtatcaccaggccatcattcgcatccaggattacatccaggccggcgactgctaccaagtcaactttgcccaacgctttcgcgcgccgtgcatcggcgatccatgggcagcctactgcgcgctgcgcgaagcctgcccgacgccgttttccgggttccagagtttgcccgatgacggcgcggtgctgagcctgtcgccggaacgctttgtgcgcatcagcgagcgtcaggtggaaacccgcccgatcaagggcacccgccctcgcggtttaacccccgaagaggatgccgccaacgccgctgagttgctcgccagccccaaggaccgcgcagaaaacctgatgatcgtcgacctgctgcgcaacgacctcggccgcagttgccgcatcggctcagtgaaagtgccggagctgttcagcctggaaagctaccccaacgtgcaccacttggtgagcagcgtcaccggcgtattggccgacgacaaagacgccctcgacctgatcgccggcagcttccccggcggctccatcaccggcgcgccgaagattcgtgcgatgcagattatcgacgagcttgaacccacccgccgcgggctctattgcggctcgctggtgtacctggacgtgcgcggcgagatggacagctccatcgcgattcgcagcttgctggtcaaggacgggcaagtgtgttgctggggtggcggtgggattgtggcggattcagagtggcaggcggagtatcaggaatcgttgacgaaggtgcgggtgttgttacagacattggaaggtttgtagggcctgtaccggccctatcgggggcaagccccctcccaccttcgaccgcgccgcgatcaaaggtgggagctggcttgcctgcgatggggcaatcagcctcgcagaaacacttacaggctcaactgccgattcgacgccttgataaactctttcttcaggtcttcaaacgtatgcaccgccgggaactgcgggaattcgcgaatcacattgtccggcgcatggaacagaatcccgcggtcagcttcacccagcatgctggtgtcgttataggaatcaccggcagcgatcacgcggtagtacagggtcttgaatgccagcaccgattggcgtttcgggtctttctggcgcagttggtagctgaccactcggtcgttttcatcggtgatcaagcggtggcagagcagggttgggaaacccagctgacgcatcagcggctgggagaactcataaaacgtgtcggacaggatcaccacctggaagcgctcgcgcagccagttgacgaactcgatggcgccgtccagcggcttgagcgtggcgatcacggcctggatatcggccagcttgagcccatgctcgtcgaggatgcgcaggcgctgctgcatcagcacgtcgtagtcgggaatgtcacgggtggtggcccgcagggactcaatgccggttttctcggcgaaggcgatccagatttccggaaccagcaccccttccaggtcaaggcaggcaatttccacacgacactcctattagatgttgttagttgagcgagcaaaaggactgccgaactctagcgactcaagcccgccgccgcaacgcgggacagattttgataccatcgccctcctagagagcgctcagcgccactgacctgtaggaaccgtcctgatgaaccaagccttcgacgtcgttgaactcgccacgacttatgccaacaagtctgcccaggacattctcaagctggcgttcagccagttcggtgatgacctgtggatttccttcagcggtgccgaggatgtggtgctggtggacatggcctggaagctgaacaagaacgtcaaggtgttcagcctcgacaccggccgcctgcaccccgagacctaccggtttatcgagcaggtgcgtgagttctacaagatcgacatcgaactgatctcaccggacccgagcaagctggagcccttcgtcaaagagaaaggcctgttcagcttctataaggacggccatggcgaatgctgcggtatccgcaagatcgaaccgctgcgccgcaaacttgccggtgtacgcgcctgggccaccggccagcgccgcgaccagagccccggcactcgcagccaggtggcggcgctggaaatcgacacggcgttttccacgccggaacgcaccctttacaaattcaacccgctggcacagatgacgagcgaggaggtgtggggttatatccgcatgctcgagctgccgtacaacagcctgcatgagcgcgggtttatcagcatcggctgcgagccctgcacccggccggtattgccacgccagcatgaacgtgaaggccgctggtggtgggaagaagccacgcagaaggaatgcggactgcatgcggggaatatcatcagcaaggcttgagcctctgatgccaccgcctctgtaggagcgagcttgctcgctcctacagaaagcgaaatttcctttttggtcgggtgaatcttgtacacaaccttgtaaccataagtgccatttttgtgtgcaacttaatatacaacgcaccaaaacgtaacatctcccggcgccaatggcgctgtctataaatagccctgcaattaacaaaaaaataaatacctgttcaaacggtcaatttataacgcttgtaattcagtaatttattctcaaactatataaaaacgaaattagccaagattttcatatatcgaaaattggcacgcatatggcttaggcataagtacgctttgtatacaatcaatacaaaacctacatacactttgccatccgccgctttgctgcagatgcgctggagcctgccggaatgcgtacaagcctctcgaacaccctcgcactggatctgccctcctccccattaaaccctgcagccgccggccccggcccgctggtgctcagcccgcgcctgcacaacaaggacctggcgcccaccaaggtcgaaggacgacgctgggggcgctatagcatcttcgcgttgtggaccaatgacgtgcacaacatcgccaactactcattcgccatcggcttatatgcattaggcctgggcggctggcaaatattgctgtccctggggatcggcgcggcgctggtgtacttcttcatgaacttgtcgggctacatggggcagaagaccggtgtgccgtttccggttatcagccgcatcagttttggcatccacggggcgcagattccggcattgatcagggcggtaattgcgattgcctggtttgggatccagacctacctggcctcggtggttttccgcgtactgctgacagccattcatccagggtttgccgattatgaccacgactcgattctcggcctgtcgaccctgggttgggcgtgctttgtggcgatctggttggtgcagttggtgattctcgcctatggcatggaaatggtacgtcgctatgaaggcttcgccgggccggtgattctgctgaccgtggctgcgctggccggctggatgtacttccaggcgaacgggcaaattgcctggtcgatccgcgagcccctgagtggcggcgagatgtggcgcaatatctttgccggcggcgcgctatggctggcgatctacggcaccttgatcctcaacttctgcgacttcgcccgctcttcgccgtgccgcaaaaccatccaggtcggcaacttctggggcctgccggtgaatatcctggtattcgccgccatcaccgtgctgctgtgcggcgggcaattccaactcaatggccgggtgatcgaaagccccaccgaaatcatcgcggcgatccccaacaccttctttctggtgctcggctgcctggctttcctgatcgtcaccgtggcggtgaacatcatggccaacttcgtcgccccggcctttgtactgagcaacctggcgcccaagtacctgaacttccggcgcgccgggttgatcagtgcctttgttgccgtactgatcctgccgtggaacctctacaacagcccgttggtgatcgtgtacttcctctcaggcctcggcgcgctgctggggcctctgtacggggtgatcatggtcgattactggctgatccgtaaaagccaggtggacgtgccacaactgtatagcgaagacccccaaggcatttattactacagccggggggtgaacatgcgtgcggtggcggcgtttattccggcggcggtgatcgccatcctgctggcgctgctgccggggtttgccagcgtctcgccgttttcctggttgtttggcgccggcattgccgggttgctgtacctgctgatcgccaagcgccaaccgcactacgccgatgtcagcggcgaaagcattgccgtcgataacgtcagtcattaaacaaggactttccatgcgtatcctcgtggtcaacgtcaacaccaccgaatccatcaccgagaccatcgcccagcaagcacgggcggtggcttcaccgggcaccgagattgtcgggctaaccccgtacttcggcgccgaatcggtggaaggcaattttgaaagctacctggcggccatcgccgtgatggaccgggtaatggcctacgaccagccctttgatgcggtgatccaggccggctatggcgaacatggccgtgaaggcttgcaggaactgctcaatgtgccggtggtggatatcaccgaagcggcggccagcaccgcgatgttcctggggcacgcctactcggtggtgaccaccctggaccgcactgtgccgctgattgaagaccggctgaaacttgccggcctttaccagcgttgcgcttcggtgcgcgctagcggcatggcggtgctggagctggaagaagacccgttgggcgccatggaggccatcgtgcgccaggcggaactggccattcgcgatgacaaggccgaggtgatctgcctgggctgcggcggcatggccgggctggacgagcagattcgccagcgcaccggggtgccggtggtggacggggtgacggcggcggtgatggtggccgagtcgttggtgcggttggggttgtcgacgtcgaaggtcaggacgtatgccacgccgcggccgaagaaggtcatcggttggccgggcaagttcgggcggtagaccgatgcgcctgcatcgcgggcaagcccggctcccacagtgatcgggaccccatgtgggagccgggcttgcccgcgatggccacgactcgatgtaaggccgtgctcagatagcactgaaccgttgagccagtttctgctcggcaaactgctcaataacgaaatccacaaacacccgcgtcttgcccggcagcaatttatgctcggcgtagtagatggaaatattgccgtcgtccacataccaatcgggtaacactcgcaccaacgccccgctgtccaagaacggcacggccatcggcatgctcaccagcgcgataccaaggccctgggcactggcgcagcaagcggcttcggagtcgctcatggtcatggccggcttcagtaccagtgggctgtgctcgcgctcacgatgggtcagttgccacgaacgcacccggcctgtctgcggcgagcggatcaagatgccgaggcagtgcgacagatcctcgggcgcccgcaccggcaagcgtcgcgccaggtaatccggcgatgccaccagcacccggtgcgccggggtcaacttgcgcgccaccacgccttggggcagctcaaacccgccaccgatggctgcatcgaagccttgcccgatcaggtcgacctggcgattatcgaagtgccagtccgggctgatatccggaaagcgctgcatgaattcgcccaacaacggcaccacgtaccgattgccgaacactggccccatgctgaccttgagcgtgcccaccggccgcccttcggcactggccaggttggcgaccgcattctgaatggtggtgaggctgccgctgacttcctccaggaacattttaccggcttcggtcagcgccaggcgccgagtgctgcgctggaacagccgcacaccgaggcgcgcctccagcttggcgacgcttttacccactgcagcaggcgtgaggctcaggtgccgtgcagcctcggcaaagctgccaccctcggcgctgcgcacaaagcattcgatactgccaaagctttccatatggccccactctaaacttttggtttacacagactatagcaaccacgggctaccgagctgcgcgggtgaggtcgatactcgctccatcaactacctcggagatcgacatgaccacacacaacctcaccggcaaagtcgccttgattcaaggcggttcccgcggcatcggcgccgccatcgtcaagcgcctcgccgctcaaggcgcagcggttgcctttacctacgtcagctcagccgccaaggcccaagcgttgcagaacgaggtgatcagcgaaggcggcaaagccttggcgatacaggccgacagcgctgatgccacggcgattcgcgcggcggtcaacgccacggtcgaggcgtttggacgcctggatatcctggtgaataacgctggcgtgctggccatcgccccactggacgaattcaagctggaagacttcgaccagaccttggcgatcaacgtacgcagcgtatttatcgccacccaggaagccgccaagcatatgggcgaaggtggccgcgtgatcaatatcggcagcaccaacgccgaacgcatgccctttggcggtggcgggccctacgccatgagcaaggcggcgctggtggggttgaccaagggattggcgcgggacctggggccacgtggcatcaccatcaacaacgtgcagcctgggccggtggacaccgacatgaacccggcgaacagcgattttgccgaaagcctgatcgggttgatggcggtaggtcggtatgggcatgtggaggagatcgccagttttgtggcgtatctggccggaccggaagcgggctatatcacgggcgccagcctgaccattgatggtgggttcagcgcctgattttgcaaaaccgcacaccaaatgtgggagcgggcttgcccgcgaaggcggtgtgtcagtggcacatctgtcactgcgctaccgctttcgcaggcaaccccgctcccacatttttgaccgcgcggggtcaggccatgggaggcaagccgtaggcggccaggtcaaagtcggcgagcttgcgaataatctggtcagcatgctggtacttgctgtcagccatcgcctcatcgggcaccgcaatagcggtcatgttggcagccttcgccgccgtcacgccgaacggcgagtcttcgaacaccaggcaatcctcaggcgccacacccaagcggcgcgcggcggtaaggaagatgtccggcgcgggcttggcggcgccgacttccgggtcgtcggcggtgacgatggtgtcgaacaggccaaaccattcacggtgcaaggtggtcttgtggccaaacgaattacgcgatgaactggtgcccaccgcaattggaatattgtgcgccttcaagtgccgtaccaacgcctcggcgccgggcatgcccagggccttgggaaaacgctcgctcatcagcggttcgcgtatttccagaaactcggcgggcgtgatcggaaggtccagtgccttgaccacgtaatcggccaaatcctgagcaccgcgcccgatgatgtgctgcttgatgccccagtcgtaggtacggccatagcgttcggcaatgatctgcgtgacttcggtgtagatgccttcggtatccagcaacaacccgtccatatcgaaaatcacggccttgatcgggacagcggtacgcggtgcattcatcacaacacaaccttggggcgaggactaaaaggattcagcacaataacggccctcgttgcctgcaagcaaccttcgtggaccaaccgttgattcataccacgcaacagttttaaccctcggcgctgacggcggccagctagggtttgagaggacaacgtcatgacccgtcgacacgaatctgaaaataccgattgcaaaccttataaaagacttattaacctccatgaactcaatccaatggacccgaaaagccgtcaaacaattgcttcggttgcattcgtatcatcagcaacaggtacgcgatgccgtgtccgctcttgaacacatgcccgatgcaatcaacgtcaaggtgctggttaaccatcctcacagctatcgcttgcgggtaggtcattaccgggtccttttcgactgggacggcagcatccaggtcgtcagcatccaagaggttaaaaaacgtgacgagcgaacctactgccgtacagatcatccacaatacgcagggcaagccagcctatgtggtgattccctatgaacactatgtggcgcagcaaaacaatccaaacctgattccccatgcggtagtcagccgcctggtggatggcgcaacacctatccgcgcgtggcgcgagcacctaagcttgacccaggaagaagtcgcccaacgcctgggtatttcacaatcggcatttgcccagcaggaagcggtcagcaaaccccgccgcaccacgcgggaaaagattgccaaggcgttcggtatcaatgccagtcaactggagctataacgtcaccctgcaaaatttcacgtattcctttactcacatcgagctcaaacatgctctaccgcctagccgctgacggcctcgtgctgttccacctggcctttatcctgttcgtgctgttcggcggcctgctcaccctgaagtggcccaagttaatgtggctgcacttgcccgcggttgcctggggcatcgcggtggaggtgctgcacctgccctgccccctcacccgttgggaaaacctgtttcgccacttggccgggcaggatggttatggcggtgggtttatcgagcattacattctgacgatgatctacccagccgggctgactgcgaatactcaattagtgctgggggccgtggtggtggtggtcaacctcgccgtgtatgcacgcctgatcaaacgcaagtaggcaggcaacccaggccaaccagggtggcctccaccgcctgttccagcggtgtgtggggctcatggccgagcgtcgcgagcaggcgctggttatccaggcgcaacggtgtttgccacaggtagcgcatctcctgcatctcacgcacggtgacgacaaaaggcgccgcccagttcaacaaccaccagggaaacgcgccgaccctgggttgctggcccgtcctgcgcagcaccacacgctggatcgtcttagccatctgcgtaccgtccgcatccatgtacccagccatatgaaagcaggcgaaggcgccaagactggcacgacgctcaatcaactcaagcattgtacgcgctacgtccggcagataagcccattgatgggccacgccgtaatcgcctgggtagcggatggtgtgcaccggtttgccgggtttgaccaagccttgggcaaaccagttattggccaccctggcgccgaaaaaatccccagcgcgcacaatcaccacccgggcgccctgagtggaagcggctcgcaagcgctgctccatctgcacacggatcgcgcccttgcgagtcagcgggtgctggggtgagtcttcgtgcagcacagggaatgcatccggcccgaagttgtagaccgtgccgggcagcacgactgtcgcgccttcgcagatggccgccgcaatggagttgtcgatcatcggcaacacccactcggcccatttgcgataacccggcggattgacgccgtgcacgattaccgcgcagccccgggcggccgcgatcacgtcgtcgcgattcagggcatcgccttttagccacgtaaaaacaggattttggctgcgagccttgatcagatcccgagtcaacgcccgcacctcccagcccgcggcgctcaactgccgcgccacttcgccaccaatgccaccggttgcacccaaaaccagaaccttgctcatcaccctctcccactgttggttgatgagggtatgttggatgcggaacagctatagaggaattgcccaagagtatcgagccgctatacatttatgtatggctacgaatatcggttgggagctttaccggtcatttctcggtgtactcaaggaaggatcgctgtcgggggccgcacggcagctcggcatcacccaacccacggtagggcggcacatcgccgcgctggaaacggcgctgggcgtcgtgttgttcacccgctcgccctcaggcttattacccactacggtcgcccacacactgcgggcgcatgcagaaaccatggcgcgtaccgccgccgcccttgaacgcgccgcctcgtcccaaggcgatgaggtgcgcggcgtggtacgagtatcggccagtgaagtggtgggtgtggaggtactgccgccgatcatcacgcaattgcgccgggaacacccgcacctgaaggtggaactggtgctgaccaaccgcttgagcgacctgctgcagctggaagccgacattgccgtgcgcatggtgcgccccagccaggagcagctgctggcgcggcgtatcggcctgatcgaagtcggcctgcatgcccgtgacgattacctgcagcaacacggcatcccccaacacatgcacgacctggccggccactccgtcatcggctttgatcaagccactgcatttatccgcagcctggcaatcaagggttttgagcgcaacgccttcgccatcagtagcgacagcgacctggcgcaactggcaatgatccgcgccggtgccggcatcggtgggtgccaggtacaactggcccagcgcgacccacgtctgcgccgagtgctgcctgacggcttcgcgtttaaaatggacacttgggtaagcatgcacgaagacctgcgcaacagcccacgctgccgggtgacattcgatgcactggtggcaggtttgcagcgttacgtacaggcttgagacagctgcgctggtgaacaatcagcgcacctcaatccgttcgcggtcgccccatgtccgaagccttcgaagttcccagcccccacgaaaaacaccttgaacacaccaccgagcatgctcacggccgcggcgatagctttgccagtcgtatcgccgtgatgaccgcgatcatggcgaccgtcggtgccatgctcagctatcaggccggctccagcgaaagtgaagctgcgatggacaagaacaacgccgccatcatcaagaccgaagccgctaaccagtggaactactaccaggccaaatccagccgccagaacctggcagaactggccagccatattcccggcgtggatgcggcgcattaccaggcggagatcgagcgctacaagcgccagaaggaagaagtgcgtaaacaggccgaaacgcttgaggccacttcacgggactgggaccacaaatccgaggaagcgctgcaccagcaccatcgctgggcccaggcgatgacggcgattcagatcgcgatttcattggcggcgattaccctgctcacgcgcaaggaatggctcaaacgcatgtcgtacaccgccggcggggtggcggtgatgttgggtggcctggcgtggctgcatctctgacacgccgaagaataaatgtgggcgctgtcgagccccaaccaggctgcaatgggatcaccgcgcagtacccgccagactgcgacccagcctcgctgattgatttcaatctgccaactgagcgcttagagtgtcgcccccccgagaattgaatctcgagattgaacctatggagttatgagtgaaatacgtcagtaaagtcgttgcagcagccgtacttggtttcaccctggcaggttgcaccggcaccgccatgaaaacccagcaatacgacgccagccaatacaccgtcctcggccacagcgaagccagcgccaccggcatcatgctgctgggcgtcatccccatcggccagaacaaccgcttcgtacgcgcccaggatgcagccatcaaggccaagggcggcgacgcgttgatcaacacacaagtgcaggaaaagtggttctgggcttgggtattgaacggctacaccaccaaaatctccggtgatgtgatcaagctgaaaaccgcgcaataaagtacgaaattgccagggcgctgaccccggcaagcgacgtatcatgggcctgactttcgaggatggcccatgaacctcagcatcatttacgccctcgcggccgccgccctgttcggcgccagcaccccgctcgccaaaagtcttggcctgggcctctcgcccatcctgctcgccggcctgctctacctcggcagcggcattggccttgccggtgtgcgcttgatccgtgatcgcggctggaaacctaccgggctaaccccatcggaatggccctggctacttggcgccatcgccttcggcggcctcctcggccccgttgcactgatgttcggcctgacccgcaccaccagcgccagcgcctccctgatgctcaaccttgaatcggtactgaccgccgtgatcgcctgggtcgtgttccgcgaaaacgccgaccgacgcatcgtcctcggcatgcttgccattgtgttgggcggcgtggtgttgtcgtggtccggtgctgacagcagccatcaggactggaccggaccgctcgccgttgcgctggcgtgtttgtgctggggcattgataacaacctgacgcgcaaggtgtcggcgtctgacgcgctctttatcgctggggccaagggcttgattgcggggttggtgaattgcagcctggcgctttacctgggggcgcagattccgggcgtggcgcaactggcgccgattctactggtaggtttcctcggctatggcatcagcctggtgatgttcgtgctggccctccgcggactgggcagcgcgcgcaccggcgcttacttctccacggcaccctttctcggtgccgcagtggcgttgctggtatttggcgagtcggtgaccgtggcgttctggattgcctcggcactgatggccgtaggcgtgtggctgcacctgacggagcggcatgcccatgagcatctgcatgaggcaacggaacatgggcattggcatgtgcatgatgaacatcaccagcatgagcatgggtttgagtgggatccggcgcagccgcacagtcatgtgcatgttcacaaggtgatgacccacagccacgcgcattttccggatgtgcatcatcggcataggcattgatgatcgtttggtacgaaaagacttcggtattctccaatcctgaagcccagtgggagtggctccaaacattacagtgcaggcgaaggcaggtacgatccaggccaacccggcccgactggacctacacacatgcctgcctccgacacccgccctacgcccgcgccattcctcaagcccggtgaaaccgtggtgttgttcgacggggtgtgcaagctgtgtaacggttgggcaaggtttctgatccgccacgaccaccaacggcgcttgcgattagccgccgtgcagtcacccgagggtcaggcgctgctggcgtgggcggggttgccgctggagcagttcgacaccctcgcagtgatccgcgatcggcactgttgggagcgttcggaggcggtgttggaaatcattgcgcaactgcctgcccgctggcgcccaatgctgctcctgcgcggcatcccgcgctttcttcgggattgggcttacgaccgcatcgcgcgcaatcgctatcggctgttcgggaaatacgatacctgtctgttgccgaacgcggaccatgaacagcgctttttaaaggatcagccatgaaccccctgttgcgcatcaactggatcgcccggggcggcctggctttcatgtttgcctaccatgggctggtgccgaagctgctgtggctaagccagggtgagcgggcaatgatccaggcgcacgggatcgagcaggtgcggttgttcgccacgctggcgggggttggggaaattgccctggcgatatggatactgctttcgccacgcagtgtctggccgcttgtagtggctgcgactgcgctggcggggctgctggtggatgtggcggtgttcagtccgtcgatactcagggaagcgtttaatcctgtgtcgctgaatgtggcggggttggcgttgtgtgcggtggcttggaataccaagccctgaacagcatttatttcagcccgagtgcctcaagtgcaacggccagcgctgatgtcagccatccagcaacagcccaatcaactgccatggcgtcatcttcgtcaccatgatcagcacgatcacaaacatcccagagaaacccaaaacacccatccagaaccattgcctatagacgccgtggtatccatcaccaagcgccctgcccgtctcagccgcactgagcgccatctgctgcaaacgcttctgcagcaccagcaccgggagccaaagagcccccacacacaggaagatgatcagcgaagtcagcacccattcggtggtcaacccaagtccggcaagcttgatcaacacaaagccggtaatgatctggacgacgcccgccggcgtagtgatccaggtatcgaactgcaccaccatccgcgccacatgggcaatcacttgcgggttggccgtacggctcgcggcgatcagatacagatacgagcccatgccgaagccaaacaggaaaatcgccgcgatgatgtggatgtatttcaggctcagatagagcatggtcagccctgcccgtcagagaaatgcacggccaggctaaggttcgccgggtcgttgatggcagccatgtattcgtcgacggtgatttcgccaacgcacggccgcgcaccgggttcaggcccatagccttgggcgactttgagggccagagcaacggcggcacagctgggaatttccgggcctttgtcattcagcgccgtcagttgcaccgccagggacagcggttgcccttctgcaccgaggccgttcacgtcgatgtacatcgcgcttttgccatcgccaaaacgctcgaaccaagtacccagccgatgcagccgcgcagcccaggcaagagggtcacgcacgacgccccaccgcagcgcctgggccagcagatagttggcgacaccgccaagcttgagccccgcaccagccttgaagctcagggtgtgggcaccatagcggccagcaaagatgtccatgtcgggcacatccacattcgccaacacccgcgtgccaagcgcaggcattttgcgcagcgtcaggtcctgccagcccagcacttcatgcacctggccatgcctgagctgcttgattggtttgcccgcataagccagcacaccttcgacggtggacaggcccggcatcttggccgaggaggaaataccgtgctcgatcgagtcgatacgggtgaagcgatagcgatactgatcgatgatggcgcacgacagcgtcggcacggagctgcacccgctaaggatcgccacgcctgcctgccgtgcttgtgcatccagcacgctcacgccgttgacgaaggtgcggcagtcggacaagtcgcagtagttcacgccagcgtcgatgcaactctgggcgacagcataggactgcccctggaacgggccgccggtgtggatcacccacttgatgttcatcgaacgcaaaacggaggcgaacccggcgcccatggcatcgccgcaccaaccctcgcaagcggtgttcgactggcttttcagctcatccaccttgcgctgcagcttatgtggatcgcgacccgagatcaccagttcaatgcccggcgccaccaccagatgccggcaaacgatgctgccgaaattgccgtagccaccgactaccaacaccctgagtgtcattccattcttccctaaacaaacgatcatgcgctgcggctgaggcggctaaagatacccgatttgtttaacagcttgggccagatcaacagagagagtcagaagaaggactacggttttacaggccctgccctggctgatcaccagcccgccccacaagccgtctcagaccacctgcaacggtttaccgcgatcaattgactccaggccagctctctacatattcaatagtgaagtccggataggagtcgacaatctggatcttgtaatcaggatagctatcgacggtttgccatttcccgacagagtccggccaggaatccaccttctttactttgaggtcgggaaattgattcaccaccttcaccttgtagtcgggatagctgtccacgaactggattttgccgtaaattttcgatacatcgaccgtcgtaccggcgtgagcgcaaaaggtgcaggtcaacagcaaggaagcgagggcaactttgaacatgagtattgcatcctgaaaaattgaggcgtccagtctatcggtagccgcgcgggccgtgccgaaaaacgcctttcccttaaactcacccacttcattgccgacggcgtcaacatacgccacacacaacgactcggcgatctggcttttgactgctttggtcgattccgggcgcgggtttcacctttgttgtttccggactttcggtagcaaccctgagccggaaataacatgagggttcccgtcggcgaagttagcgataaaacacaacgctgtgcgggctataaagtaaataaattcgtcccctttttccgttcgagtcctctgaggcgactagaccaatgccgcgagatagcctttcttataggcaacgtcctacacgcctagcagaaatagggggctcccgttccaaaaacgctatgtctatagtcacccggtcgcccacatggcgaccgggtttggcgactcgaatataagatggcagaaagcctcccggctgatttgcgggatgcccctgcacgcaataagctactcaatggtagctgtgcgtgggagaccttcgagtctgccggtctttgtccgttcttataccggttcgccaacctgcgtacagttgccaccttttgtttggcgacaaataggtggcttcaacccctctaagcgaacggacttacgcatgaaccaatacatagcactcaacagcaacgacagcgccacaccagccctttttgtcgataccaccgtgccgctggaaacactcctcgacgcagcgacctatcgacttcgtgccgttactcaagtccttgaaaaccttgctctacgtagtgaaatcagtagtgatgcggtggtgctgagtgattttgcgctgctctgctcaattccgctgcgtgacgggtgtgatttgctcgatgtcatcgggcgacggatggacgtgccgtgcgcataatctaagaacaacaggtttttcaaactcaaaaattacaaaaccccaggtttcttttgaaacctggggttttgtttgcttcgaaagcgctgaagcgaaataaatccgtcccctttttccgggttctaaaaccagaggggttgtttgcttcaaattggtggtgaagcgaaaatcaaataaatccgcccccttttctagtatgtatacccagaacaagagatagaaatacgacaccaacctgatcgaaatacccccttccgtcaaaaaatagcctttgacgaaaattttagaatattcggtgacaaacggctgaatgtagtagccatgcgggttacaagggtgttccacgtttcatacacattttacgtacagcgttatccacaggcagtgcgttgctaagcctccaaaaacgcattatcttgtgttcagacgaaaaaaaaaccctacatgtaggggttagcgttggccgtgccctaacatgggcaggtaagaagacagcgggtgattacgcttcgtttttccggacagaacgtaatcactcgcccactcaagccagcggttgttgtaacccgacctgagagtcggcattagagcgaatcactaccccatcgtcaaacgatggattgtgaaacctactcaacggtgccttttttcaggcgggcaaatcccactgagataggtaccgctatcatgagcaaaaacaccaagcaatcatcgccgaaggtagccaccctggcgtctgaaacccttcgcgatcctaacgcctcagccattgcgaaaagcttagcagcatctgcgctctcccaatcctcttctgcaaaggagacagggaaagcaatggagacaaaggcctcgcaggttctgcaatccgagaagtacagcgataccacgaagacgctcgctgcgtctgtcctatctcaatctgacaaatcgcgataaggagagacgatatggctctgtattttttggaatatgacctacgaaagcaacgcaactataagcctctgtatgacatgctagcgacatttggcgcggtgcgtatccttgagtctctctggtgcttcaatcgcgacaacaccagtgcagttggcctccgagactactttaggacgctaatagatagtgatgacggaatcgtcgtatctcaggtgctagattgggcaaccttcaatacccaaggaacgcccgcccagttgaagtagagaatcggattgagccccgacgtctggggctcttttaatcatcaaccaatgccagcacaaacctcacaaataacagccccctgaactggctcctaatcaaaaaggaggccaaccagatcacgattaaaaaaggatagttcgtacaatggcaggcttaaggctcaaaaggccccgggaccaaaccatgcgaaacctgagtggggaaacagaatacgcagaatgcaaaaaggccccatttatggggcctttaggtataaatttggcggtgaaggagagattcgaactctcgatacaatttcttgtatacacactttccaggcgtgctccttaagccactcggacacttcaccgtatctcgtcaaaccagttcagtctgtcgaggcgcgctaatgtagtcgaaagcctttctgatggcaaaggtttttttcagaattttcatgcggttagcccgttatgccattcaccgcccggctgggggtggtgattgtgccattctcaggcatcggcggcacgcgtctggagcgcttgctgcgccctgctccggggtgtctacccttggggatgaggcaaaagcctgactgggtagtcagtcacggcgctttacccgcgggggcgtggtgagtaacgtctgcgcatctatctctataacaagccctacaaggaaccgcgtcatgagtgagttgattgcctaccacttcgaagacggtatcgcgaccctgaccctgagcaacggcaaggtgaatgccatttctccggcggtggtcagtgagtttaatgcggcgctggatcaggccgagaaggatcgggcggtggtgatcatcacgggcacgccggggattttgtcgggcggttatgatttgaaggtgatgaccgccggccctaaagaggcgattagcctggtgacctcgggttcgaccctggcgcggcggatgttggcgcatccgttcccggtaattgtggcctgccccggtcatgcagtggccaagggcgcgttcctgttgttgtcggccgattaccgtatcggcgtcgacggcccgttcagcattggcctcaatgaagtggcgattggcatgaccatgcaccacgccggtatcgagttggcgcgggatcgcctgcgtaagtcggcgtttcagcgttcggtgatcaatgccgagatgtttgatccacaaggcgccctgcacgcaggtttcctcgacaaggtggttgcaccggaagaactgcaagcggctgcactggaagcggcacggcagttgaagaagatcaatatgaacgcccacaagcacaccaagttgaaagtgcgccgcgcactgctcgaagccctggacgatgcaatcatccaggatcagggccatagcctgagctaagtcctacacccttcgtgtccgagcccgaccttgagtcgggctttttcttacctatgaatgtgaaacttccataaccgctctagttagccgttatcggcccatgtggaaacatgcgcttaaacatcggctatctcctacgtctgtaggggcaattgccgaatacagtgcacatccgtacactgcgccaccttttgtcccgatgggccgtgtcgatgctttttctgttgcgtatgttgttgatgggcctgcattttatgatcgccggcgtgctgggtgtgctggtcggtgtgtgccggccgttcaatccggacaacagccgtctctgcgctcgcctgtatgcgttgccggccatgcggatcctgggcttgaacgtgaagaccgacgtcgactcgctgcgcaacaagcccggtacctgcgtggtaatcgctaatcatcagtccaactacgatctgtttgtgttcggcaatgtggtgccccatcgcacggtctgcatcgccaagaaaagcctgaaatgggtaccgctgttcggccagctgttctggctggctggcaatgtgctgatcgaccgcggcaatgcgcacaaggcccggcgtgcgatgctgacgaccacgcataccttgcagcatgaggacacgtcaatctgggtgttcccggaaggtacgcgcaacctgggcaaagggttgttgccgttcaaaaaaggcgcgttccatatggcgattgcggccggtgtgcctatcgtgcaggtgtgtgtcagtaactatgtgacgcagatgaagctcaatcgttgggacagtggcagtgtgctgatacgctcgttgccgccgattcctacctgtgggttgacggtggatgacatccctcagttgctgctgacgtgtcagacgcagatggatgagtgcattgcacagatggaccgcgaactgcaacgcgcgtaggcgcacgcttagggtgacgcggagcgtcacgggcggcattcccacgcagagcgtgggaacgatcagtgatatcagccagcaacaacggaacgccattcaggctaagctgcccaacatctgtcctcttgataagaagtgatcagcaccatgggtagagttgttgcggctgccgtctacagcgccggtaagaaagtctcggatatcaccctcgatgaaggcgcggcctgggccgccaaacctgggcactttgtgtggatcggcctggaagaacccagcgcccaggaattgaacaacctgcaacgccagttcaacctgcacgaactggcgatcgaagacgcgatggaaaaacacagccgcccgaagctggaaaccttcggcgatgcgctgtttatcgtcacctactcaccggtgcgcgagaacggcaagctggagtttatcgaaacccatatctttgccggcaacggctacatcatcaccgcacgcaacggccactcggcgtcctacggttttgtgcgccagcgttgtgaggcgcgcccgttgttgctggagcatggggaagatttcgtactctatgcgttgctggattttgtcaccgaaaactatcagccggtgagcgaggcgatccatgtcgagatcgatgagctggaacgtaacgtgctttgcagttcactcaacgagcgtgatatccagcacctccacggcctgcgccgcgatgtgttgcggctcaagcggcatgtggcgcccatggtggaaatcagccaggagttgcagaagctcagcttcccgtttatcgacaagaacatgcgcccgtattttcgtgacgtgcagatccatgtcacgcggcagatggaagacctcaccaccttgcgcgacattgccagccagaccatcgagatcggtgtgctgctcgaggcctcgcgccagagcgtggtgcagcgcaagttcgccgcatgggcggcgatcctggcgttccccacggcggtggcggggatttatgggatgaacttccagaacatgcccgagctgcaatggcactacggctattttgcggtgctcgggtttattaccctgggctgtaccgggttatgggccagcttcaagcgttcgggctggctttaagccttggcttcaggctgatgcgcaacgaagcgcatcatccattccgccacggtgacgccgtggtggtcgcgttccaggctggccacgccgttgctgtagaccttttcacccagggttgtctgaagtatttccagcaactcgcgggaatagtcgtgaacaaactccggatggccctggaagcacagcacctggtcgccgatgtggtacgcggcaaacgggcagaattcgctggaggcgatcaccgtggcgttttgcggcaaggtggtgacttggtcctggtggctgatcaatagcgtcaactccggcacctcgggactcatccatggcgtcttggcatccagcttgtaagcgtgggtgcccatgccccagccctggctggcacgttcggccttgccgcccagcagcagcgcgagcaactgatggccgaagcacacacccagcagcttgtcgccccgttcatagcgcgtgagcaggtaggtcttgagcgtctggatccaagggtcggttccgaacgaatcggccttactgccggtgatcaggtacgcgtcaaacacctcgtcatccggtgggtactcgccctgcaccacgttgtagaccacaaactcggtggcaatcggttgcttggcgaacaggcgcttgaacatctgcccatagccttggtactcatcgatcaaagcgggacgcagaatatcggtttccaggatgcagacgcgtagcgacataaaaaatacctgacacggcgatgggaatattgcacacccagagcctgccctgaaatacccccccaaagcaagccctcaatgggcacccacacacactgtaggagcgagcttgctcgcgaaaaacgtcaacgataacgcaggtatcctggataaaagcgttgcctgtgcgttcttcgcgagcaagctcgctcctacagtggaacgtctaaaacagtgcgccttttgcggctttttccagtaataacgccggtggcgagaagcgctccccatactcctcagcgaggtagcgggcgcgggcgatgaagtcgctcagcccgtactggttgataaactgcaacgcgccgccactccaagcggcaaagccgatgccgaagatggaaccaacgttggcatccgccgtggacatcaatacgccctcctccacgcagcgtacggtttcgatggcttggataaacagcaagcggtcacgcacgtcgtggggtgagatttgctcgccgggctgctcgaaccgggttttcagctcaggccacaggtgcttctggccgccagcgggatagtcgtaaaaaccagcgcctgccgccttgcccgtgcgcttgtattcgttcaccaacagatcaatcaccgccgtcgccggatggttcggcatggccttgccttcggccttcaggtccttggccgtttgctgtcggatatggctcatcaggctcagggacacttcatcggacaccgccaacggccccactggcatcccggccttgcgcgcttcggtctcgatcatcggcgcagccacgccttcgccgagcatggcgatgccttcgttggtaaaggtgccgaatacccgcgaggtgaaaaagccgcgactgtcattgaccacaatcggggttttcttgatttgcagtacgaagtcaaaccctcgggccagggtttcgtcgctggtgcgcgcgcccttgatgatttccaccaggggcatcttgtccacggggctgaagaagtgcaggccgataaacttggcttgatcgggcaccgccgtggccaggccgctgatgggcaaggtggaggtgttggaggcgatcaccgcgtcggcccccaccacgttttgcgccgcagccgagaccttggccttgagtgcgcggtcttcgaatacggcctcgataatcaggtcgcagccggccaggtcggcgtcatcctgcgtaggatgaatgcgcgccagggtggtttcgcgctgttcggcggtcagttgcccacggctgaccttcttgtccagcagtgcagccgaatgggctttgcctttttcggcggcggccagggtgatgtctttgagcaccacctcgatacccgcacaggcactgacataggcgatgcccgcgcccatcatcccggcgccgagcacaccgaccttacgcgtgacgtagggcgcatagccctgggggcgtgagctgccggcattgatttggttgagctggaaccagaaggtgctgatcatgttttttgccacttgcccggtcaccagttcggtgaagtagcgggtttcgatcaggtgcgcggtatcgaagtccacttgggcgccctcgacggcggcacaaagaattttctccggcgcggggaagcagccctgggtcttgctgcgcaaaatcgacggcgcaatggcgagcatctgcgcgactttagggtgggacggcgtgccgccggggatcgcgtagcccttgttgtcccagggttgcctgacttcgggattagccagaacccaggcacgggcctgtgccagcaatgcctcgcgatccgccgccacctcatcaatcaagcccgcttgcagggcctgggcaggccggacttttttaccttcgagcaaatacggcaaggctttttccaggccaagcatgcgcaccatccgcaccacgccgccgccccctggcaacaggccaagggtcacttccggcaaacccagttgcactgacttgtcgtccagcgcaacccggtggtggcaggccaggcaaatctcccacccaccgcccagggccgcgccattgatcgcagccaccaccggtttgccgagggtttccaggcggcgcaactgcgctttcaacaccaacacactgtcgtagaacgccttggcctgggctttgtcgaccttgatcagctcattgaggtcgccgccggcaaaaaaggttttcttggccgaggtgatcaccaccccggcgatctcgttcttttccgcttccaggcgcgtgagggtggccgccatggcttcgcggtaggcagcgttcatggtgttggcgctctggccgggcatgtcgagggtcagcaccacgatctggtcctggcctttttcgtaacgaatggcatcggtcatgacaaattccttaggctcagaggcgttcgataatggtggcgatacccatgccaccgccgacacacaaggtggccaggccgtagcgttgctggcgcacctccagctcgtcgagcaaggtgccgaggatcgcgcagccagtggcgcccaaggggtggcccatggcgatggagccgccgttgacattgacccgtgcggcgtcgatgcccatgtccttgatgaacttgagcaccaccgaagcaaaggcttcgttgacttcgaacaggtcgatgtcttcaacccgcaggccggccttggccagcgccttgcgagtggccggcgcggggccggtgagcatgatggtcgggtcggtgctggtcaccgccgtggcgacaatgcgcgcccgtggttgcaggcccagctcgcggcccttggcctcggagccgatcaacatcagcgcggcgccgtccacgatcccggagctgttgcccggcgtgtgcacatggtggatgcgctccacgtggctgtagacccgcagcgcggtggcatcgaagcccatctggcccatcatttcgaagctgggcttgagcttgcccaagccctcgagggttgagtcgccacggataaattcgtcatggtccagcagcacgatgccgttctgatcgtgcaccgcgatcagcgacttattgaaggaaccgtctgcccgcgccctggcggctttctgctgggactgtagggcgaagctgtcgacatcctggcgcgtgaagccttccagtgtggcgatcaggtcggcgccaatgccttggggcgtgaagtggctgtgcatattggtttgcgggtcgagcacccaggcgccgccatcgctgcccatgggtacgcgggacatggattcgacgccgccgaccaccaccaggtcttcgaagccggaacgcaccttcattgcccccaggttcaccgcttccaggcctgaagcgcagaagcgattgacctgcacaccggccacactgatgtcccagtccgccaccagcgcggcggtcttggcgatatcggcgccttggtcgcccaccggagtgacgcagcccaggacgatgtcatccacttggcgggtgtcgaggtcgctgcgctgcgccaacgccgtgagcaagccagccaccaggtttaccggtttgacgctgtgcagggcaccgtcggccttgcctttaccccggggcgtgcgtatcgcatcaaagatcaaagcttgggtcatgacatcctcgaaccgctgtgggtgtgtgcccctaccttaggcccgattgacacggtttcaatgacggatgcgctcattgcttttgaccccctcgctcggacgaacggtaggtccctatgggaaaaccctgattaatcgttttagcggtctagccctagggttggcgccaagatggcaataagcctcatgccgtttttagcgcaaataattattagctgatatgaaatgggtctaagccagaaagaacgggcgctctaaggttgaacctgtaagacgctgctgccgggttttgctggagcagctgtaagaaaagtgcaacgtcacctcgcgatactggatacaacggcacgcatttgacgctcaggaataacaacaaaagaaaaggcagtcagccatgttcaaacaatcgaaagtacgtcaggcgggacttattctgttcgccaccaccctgattctgatcttgcccaatttacccaaggttattgggtgacactcccagcttccgtgctcacaccgcaccaggccagccgcttttggcagcacctgccaggacattgcgcttagcgcgcctgttgcaggggctgtctttttacctgccgttttccgttatcgtgtgcgccctcactctctcgcaacgggcctgtgccttgaaaccgatcctcgccctttttgccctgctgttgagcctgcctgcggcggcggcacccttgaccatcgagttggaccacagccaaaagacctggcagaccgccgagttgctcaagcaccccgacgctcaaacggtgcagatcatcgatgatgtgtcctacaagcgcacgatgacctaccgtgcagtgcccctggcggcgctcttaccgggccttaagcctgcgaaccacctgcaagccgttgcccttgatggttttgccgccgaacttgccgccgcgcccttactggaaaaaaacggcgcccgcgcctggttggccgtggaagacccggcccatccatggccaccgttggcacagggcaagcccagcgccgggccgttctatctggtctggaccaaccctcaagccgggcatatcagccccgaacagtggccgttccaagtctcaaaattcaagcagttgcagacggttggcgagcgtttcccggcgctattgcccgacccgaaactggcggcgaacgacccgatcaaccagggctttgcgttgttccagaagaactgcctggcgtgccaccgcctcaatggcggcggtgatgcccagatgggcccggacctgaatgtgccctacaaccccaccgagtatttcagcggcgatttcctcaagcgttacatccgcgacccgcaaagcctgaggcattggccacaggcgaagatgccggcgtttacagccagtgtattgccagacaatgagttggatttgctggtgggctatctgcggcatatggcgggccgcaaactgcaaccttgagcctgcgctgtatcgatcgttcccacgctccgcgtgggaacgcctcttgtgatgctctgcgtcacgctttgggacgcggagcgtcctcggctgcattcccacgcagagcgtgggaacgatcaagcaacgcagagcgcgggggcgatcattgctgaggcgccacgaataccttggcgtgcatctgctcatgcccaccaccacggcgcatgccgcgtaccgggcaggcatcgagatagtccaggcccacggccagcttcaagtgccgctccggccgcgccagttggttggtcacgtcaaagctgtaccaggcgtcatccagccaggcttcggcccaggcatggctggccaggtgcgcgctgtcttcggtgtacaaataccccgacacataccgcgcggggatccccaggctgcgtgcgcaggccaggaacgcatgggtgtggtcctggcacaccccagcggcagctgcaaaggcctgggcggcgcaggtatcgacgtcggtcgcgccaggggtgtagaccatggtgtggttaagcgcctgcatcaagtcgataagcgcggtgcggtcgcgacgctgatggcagtgttgctcggcaaagccgcgcagggcgtcgtcgggctcggtgaggcgcgtagagcgcaggaacggaaaagctgactggctttcgtgttcggcctcgcgcaattcatcgatttccaccacgccccgggcgccaatgatgatggcgtcatggggctcgtccagggtgagcacatgcaagatattaccgaaggggtccacctgggcccgcaccgggcgtggcaggtcgagttgccagctcagcacgtgctggcgctcgctgtcatggggtgtcaggcgcaggtactggatgctggcgcgcaccaggtcttcgtagtgataggtggtgtcgtggctgatggagagtctcatgccgcctccaggtaggaactgtagatggcgtcgcccaactggcggaccaaggggataaagtcggtcagccaggcatgcaggccttcctcgaggatttcgtcgatggcggtaaagcgcaggcgcgcatccatctcggcggccaggcgctgggccgggcggccgttgatgccgggcaggctggcgaggatctggtcgatctcttcgctgcaagcgcgcagcgaacgcggcacatcggcgcgtaacagcagcagctcggccacttgccgagcccccggtgcatcgcgataaatctcggtgtaggcctcgaacgatgacagcgcacgcagcaacgcactccattggtaatacgcgtgggccgtgccatcgctgaccgctgcagcctggtcgccggccatttcgtagcgggcatccagcaggcgcagggtgttatcggcgcgctcaatgaaggtgcccaagcgaataaagcggaaggcatcgttgcgcatgatggtgccgtaagtagccccccggaacaggtgggaacgctccttgacccactcacaaaaccggctcatgccgtagtggctcagcccctgctgggcgatatcgcgaatgtccagccaggtggcgttgatgttttcccacatgtcggcggtgattcgcccacgtaccgcatgggcactggcccgcgccgcgcccaggcagctatagatgctcgccgggttggccgcgtccagggcaaaaaagtgcagcaagcgttcagcgtgcaaggggccatggcgcgcgtggtaatcctccagggtgccggtgatcaacagcggcatggccaattcgtgcaggccatcgccgcgcccgtcctggggcatcagcgacagcgaatagctgacatcgagcatgcgcgcgaggttttcggcgcgttccaggtagcgcgacatccagtacaaatccgaggcagttctactcaacatggcatcagtcctcgaccacccaggtgtctttggttccgccgccctgggacgagttgaccaccaacgagccttcgcgcagcgccacgcgggtcaggccacccggtaccacgcgggtgtccttgccggacaacacgaaggggcgcaggtctatgtgacgtggggcgatgccgttttcgacaaaggtcgggcacgtggataaacacagggtcggctgcgcgatataagcgtgtggcttagccttgatacgcgcccggaacgcttcgatttctgcggttgtagacgcagggccgaccaacatgccgtagccaccggagccttgggtttctttgaccaccagatcgggcaggttggccagtacgtgggacaactcgtcaggcttacggcattgaaaagtcggaacgttctgcaggatcggctcttcgtcgaggtagaagcggatcatttcagtgacgaacgggtaaaccgatttgtcgtccgcgacgccggtgccaatggcattggccagcaccacattgccgcagcgataggcggcgagcaggccgggcacaccgagcatggagtcggggttgaatgccaaggggtcgagaaatgcatcatcgaggcgacggtagatcacatcgacagccttgggcccgtcggtggtgcgcatgaatacacggtcatcgcgcacgaacaaatctgcgccttcgaccaactccacgcccatttcccgggccagaaaggcatgttcgaagaacgcgctgttgaaacgcccgggcgtcagcaccaccacactggggttatccagggggctggcgcttttgagggtgtcgagcagcaggttggggtaatggtcgatgggtgcgatgcgctgggccgcgaacagttcggggaacagacgcatcatcatcttgcggtcttcgagcatgtagctcacaccgctgggcgtgcgcaggttgtcttcaagcacgtagtacgtgccgtcgccatcgcgtacgaggtcgaccccggagatgtgcgaatagatgtcgcggtgcaaatccaggccctgcattgccaattgatattgctcgttggccagtacctgttcggcaggaatgatgccggccttgatgatgcgttggtcgtggtacaggtcggcgaggaacaggttcagcgccttgacccgctggatgcagccgcgctcgacaatccgccattcactcgccggaatgctgcgggggatggtgtcaaaggggatcaggcgctcggtgccttgttcgtccccgtagagggtgaaggtgatgccggcgcggtggaacagcaaatcggcttcacgccggcgctgggccagcagttcggcaggggtgtcggccagccaacgggcgaactcgcggtaatgggggcgaacctgccctgccccatcgtacatttcatcgtaataagtgcggatcatgccgtactccttgtcacccggacgcaagaaccttcgcaaggcccgtgccagcggcataaacacttaataatcaatcacttgaataatccaagcggaggcgccgcaccgtcctggtgcgcgcaattgcctgggtcaagccgtgcgcttcattgcaatgcggtctttggctatcaacagcatagtcagagttgatttcactgcgcggctggcactgcggataatcacctccatcggctgaacaggagatgtcctacagctaaaccttttgtgcaagcgatatggtgttacttcgtgtactgatctacctcctcgaacttccctttccgccaccctatttgggtggcttttttttgcgcgtaaaacggcggttcacctgccacggccgcccaaacaaaatcggccgacccaaaggtcagccgatacgctgtgctgctcataaataccaactacatgggtaacccacgcacctcctgcttgacgccccatccctcgataatcccacccaggggctccaccactgcctcaaagtcttgctcgaaatctcctatgccgtcgtaggttgcgaacatgattttgctcagttccaggtaccaggcgccatcgtcgcgcgcgctgacctgggcattgagggactccccacgaaatcgacccgcagccctgcgcgcccgttcctcatccgggaaaatggcgtagaactcgatggggtgaaaacgcgagaaatcaaagccgccttctttcatgcggcgcaatacgttggtgctgatgtcttcttgataggctgtgctcatgaaacgtcctcctcaaaccgatggatagactttccgtgcttcctgaagccccgcgccctgctggcgcgggcaccacggcataacaacaccgcaggaaaacaagcatgtagctgacaagaccagaccttagcgattcattcgctgatctcgattgcagagtagcgcgaagctatcacctccaccagaggtgctcgtgtggcgtgtgaaaaatgtttagacggagggagaaatatcgagaatctggatactgttctggtctttgagaatcttgaccgtcggctcgggtttacggccttccaggtcattgagatcgagttcggcagcaatcggcaccagcttcgcacgaatcatatgcgcagcgtcttcgaggctgggcttttgttcgcaggtgaactgctgcacggacttttcaccgtgatcatcaacgaaggtaatttgccacgtttgcatcggtgcctcctcgataaaacccataggtgggcttacacatatctggaccttggcggcgcgcaaaacgttccgctcaagcccggaggcaccggattaactgcacttatttttcagcgtgatctttcaaggctttcaaggtgttgaacggtgcgtccaccacgaacttgttggccaaccacgaaggtacgctgccacctggctcggtgtgtacctggtaggtgacttcggtctggttatcgccctttggcaccagtttccagaacccctctacctgggcgacccgcacgtagccttttgcttcaggcttgtaggtcggcacaccttccagtttgcgcgtgacggtgccgtcagcggctttgctggtggtgacgtggatgtacgagtcgcggtccgtcacggggaacggcgccttgaactgggtataggtccaggcctcgtcgcctttcttgtcgacgagtttctgggatttgcattcatggatccatgcgcaagcaccgaccacatcttcctgcagcgcctgaaccttggccaaaggcgccttgatcaccgtcacaccgcgatacgccttgtacttggaaccggcaatctcgctcagggacaccttgataccgtcttcatccttggcgacttgccaatcctcagcctgggcagtggccgcaaacaacagcgtaaaaccgcacagcacagccactcgtttcagcgaacccatcgttgtattccttattgttgaagttccgatagtaaagcccatcaagccgccgtcatctgctcccaccagccgatcagccggatggcatcggcctggtcgttgccacagacgtcgatatccgccttgaaatcactgcacacggcgggccgctgcggttgaccgaacaactggcacagttgttccaccgacaggtgcacgcagcgaacgccggcgggtttgccttggggcattcccggcaacggtgaactgatggagggggcaatgcagcaggcgccacagccttcacggcatttcatgaccagcaggtcctcgacgactcaatagggatggccgggctagagtacgctcttaaacagccgttttaaaatggcccaacaggggtttttcgcacaaaacaaaagtgaccgaccagtctgcgacagatggtcggcaacctgggtcacctctggtccgaaagtttattgcttgaattcgaaatccagcgcagcgccttcaacatcacggcgctcttcgttacgcagttgcagcttcatctcgttgctgagcaagcggccgttgatctggaacgcgctgttgtcggtgggcttttcgccaaacatcggcggcagcaagggcacgctcttgggcttgggcatggtgccgatgggttgtaagtgcctgaccatgtccgaaggcagggacaggtccaactgtgccggtggtagcttggtctgggcgacttcacgggccgacttggacttgctcgccacgggggcacgctttttggtcgaggcggccttcttttgtgccgcgggggcttttttcgcaggggttggctgcttggctgaggtcttttgctcggcactgacggcaggcttgccatcagccatcggcgctgcagccagcacgctgcccacattgcacaggcccagcaggccaatcatccatgtaacgcgaaaaatagaagtcatatcgccaacagcattaacggcagaaggccatatgctcgcttgttgtgcgcggcatgacaagggcacagatcagccttgtcctctttacacgcctcaaaaacccgctgcggcctcttggcataactggctggcaagcattcccagggtcatcagggcccgctctgcctcgcggttccacggcgtgccgcaattgagacgaatacagtggttgaactgttcggtattactgaagatcagccccggtgcgatgctaatgccttgttgcagggcacgcacatgcagctcctgggtattgacccgccccggcaaactgacccacaagataaagccgccggtcgggcgggtcatctgggtgccctcgggaaagtattgctgcaccgccagttggaaagcgctgaggttcttgcggtattcctggcggatgtagcgcaaatgacggtcgtagccaccgttttccagataggccgcgacgcccatctgcgtgacgctgcaagcagaatgcgtgctgaacatctgcaggcgctggatttcctgctggtacttgccggcaatcatccaaccaatgcgcacgcccggcgacagggttttagaaaagcttgagcaatagatcacgcggtcgaggcggtcgtaggccttgagggctttggtgcggccaagttcgaacatcaactcgccgtaaatatcatcttcgacgatctggatatcgaagtccgacgccaggcgcagcaactgtttctgccgctcctccggcatggtgccgcccagcggattactcaggcgtgtggtcaacaccagcgccttgatcgaccattggttggcggccagttgcagggcttccaggctcatgcctgtagcggggtcgctagggatctcgatcaccttgaggcccagcagatcagccaattgcagcaagccgtaataggtgggtgattcagccgcgatcaggtcgccagggcgcgtcagtacgcgcaacgacatctgcaatgcatcgacacagccgtgggtgatcaccacttcggaagggtccactaccacgcccgcgtcgcgcatgcggatcgccacctggcgccgcaggggttcaaagccagggctgaacatgtagctgaaggcccgtgggctctggaaacgtgtgaccttggccaattgctgatgcagtgcccgcaccggcaggtagtcgacactcggcaccgccgcgcccaacggaaacaccccttcacggcgcgactcgaccagcacctgctggataatgctgctacgggtgaccaaccctgggcgctcgacgcgtgcgatatctggcgtaggcgccgtgagtgctggcgtctggtgcacgtaatagcccgactgcggccgcgcccgaatcagcccctggtcttccaggttggcgtaggcctgcagcacagtggcatggctcacattgagctgggagctcatcttgcgcaccgacggcacgcgctcccccggttgatagacaccgcgccggatgtcctcagccagttgctgggcaatacgttggtaaagcaacagattggtcatgacgcagcactcgatttcacgggtattttatttttgtgtgaaacataccggcacagtttagaagtgtacggggacagttgccacaatagtcgagcgcgggcgggagtgacagtaaaaactgtaagggggctgggacagcattcatagagcacaaaaaaatgtgggagggggcttgctcccgattgcggtgtgtcagtcaaggatgtacccactgaacaaccgctatcgggggcaagccccctcccacatttgatccggttctggatgttagcgtgctgcgcccaattggcccttctcgtcagagaacacaatttcaacccggcggttctgcgcacgaccacgctcggaggcattggcttccaccgggtattggtcgccatagccctcgacctcaatgcgcttgtcatcgatacccaggtccatcaacaggtcggccaccgattgagcacggtcgcgggacagtttcaggttttcctgctcgccaccggtgttgtcggtgtagccctcgacgcgcacccgacgcttggggttcagttgcaggaattgcacgatcttgagcactgtgcggttggccgagttctgcagttcagcttcgccagtgtcgaacagtacgtcccccagggtcatcaccaggccacgatcggtctgggtggtgaggctggcgatttgcgcttcaacccacttgccctgctgttgcacgctggccagcttgttttcgcgcaaggccagttgcaggcgctgacgctccaactctagttgggtgccgcgctcggcattcaggccctgctgggtgtgctctcgggcaatggcgctgtaacgctggctcaggtaggcgtaatgcaccacatcggcgccgctgccccagtagctggacaggcggtctgcgcgagccagggactcgccggcgcggatcacgtctttgggcgcgaagcgcagcacgttggcgtcttccttgaccttctgaaagtcatcgccagcctgctgcaacgcctgctcgctggtgggttggctggcacagccgcccaaggccacgctgcccagcagcagtacacaactcaaaccacggatcatcgggctcattgtgcctctcccaactgcagctgcttacgcaggcgagtgatacgggtattgagcacgttcaattgttcctggctcttaccggtcagcactttggcttcggccaggcgcgcgtccagctccgcctgctcggcgcgcatacgcgctcgcttgtaggattggtcggccatgttgcccttggccctggcgaatttttcttcggccagtttcagttcgggggattcatcggtgttggccccgaccgcagtggcttgttccaaggcttgctgggtcaggcgcatttgttcgatcggcgcaggatcggttgcacatcctgccagcgcaacaacggcgagggccgcgaaaagagctcgaaaaatcactgtaaatccctactttgttggggtgccgacaggttgttgcaattgcgccttccagcgctccagattgcgctgcagcgcggcttgcgcgacaccggaggcgggcaattctgtcatctttttcgtcagctgtccgcgcagccaaggatcattgcaggccgagttgtgggaaatcgccaagtacaggccaggctgatcgacaggcacatcatgagccaccaggtcattactcatgcccagagtctgggccatggccatgccggaatagcgcccagccagcacatagtccacctcacccaacagcagcttctgaaaggccggcgtcaagttgggcagacgttgcaggttgagttgctggccggcgaaggtctcgaactcggcgctcaagcgcgcacgctccgagactgcgcctttgtggccgtgcaaatcggcggcggtggaatagaccagggcggaatccttgcgcgtccataccaggtagtcggtctgcatcagcgctggatggatgtagtcgaagtggtccagctcgcccaggttcagcggtgcgtcggcgagaatgtccatgcgcccgctgcgtgcttcctccagggccagggagcgtttgccgccgtagagcaggtcgattttcagccccaggtccttgcccacttgttgcagcacgtcagcggtggcgccgatcaggtgcgtagggtcctgggggtcacgccagagtaatggcggcgcgtccgggctgccggtgatcaccaggcgctcgcacttgccggcggcgagcgtcaggctcggcagcagcgtaaggcccaacagtaaggcccaggggcgcagttccatggcaagactctcccgatcagtaaaaaaaaacccggtcataagaccgggctctttataagtgaagtggctggattagaccagcttctccaactcaggtacggcttcgaacaagtccgctaccaggccataatcggcaacctggaagatcggcgcttcttcgtccttgttgatcgctacgatcactttggagtctttcataccagccaggtgctggatcgcgccggagataccgacggcgatgtacagctgtggcgccacgatcttgccggtctggccgacctgcatgtcgttgggtacaaaacctgcgtcaacggctgcgcgggaagcgccgaccgcagcgcccagcttgtcggccagggcgtacaggtgcttgaagttgtcaccgttttgcatgccacgaccgcccgagacgacgatcttggcagcggtcagttcaggacggtccgacttggccagctcttcgccgacgaagctggaagtgccagcgtcgtgggcagcggagacggcttcaacggcagccgagccaccttcggcggcaaccgggtcgaaaccggtggcgcgcacggtgatgaccttgaccgaagcgttggactgtacggtagcgatggcgttaccggcgtagatcgggcgcgtgaaggtgtcggcgctttctaccgagataatctcggagatctggtcaacgtccagctgcgcggcaacgcgtggcaggatgtttttgccgttggaggtggcggcagccaggatgtggctgtagctcttacccaactctgcaaccagtggtgcaacgttttccggcagctgatgcgcgtaagcggcattgtcagcgttcaggactttgctcacgcccgcgattttcgcagcggcttcaaccacggcgccagcgccctgccctgctaccaggacgtggatgtcgccaccgattttagcggcggcggccacggtgttcagggtggccggagccagcaccttgttatcgtgttcggcgattacgaggatagtcatgatcagatcaccttcgcttcgtttttcagtttctcgaccagttcagccaccgacttgaccttgatgcccgcgctgcgtgcagccggcgcttggactttgacggtcttgttggtagaggcggtggaaacgcccaaagcatccggagtcagcgtctcgagaggcttcttcttggctttcatgatgtttggcagggacgcataacgcggctcgttcaaacgcaggtcggtggtgacgatggccggcagtttcagggaaaccgtctgcgcgccgccgtcgatttcacgggtgaccgcaacgctgtcgccgctcacttcgactttcgaagcgaaggtgccctggccgtaaccggtcagtgcagccagcatctggccagtctggttgttgtcgctgtcgatggcctgtttgccaaggatcaccagttgtggctgttccttgtcgacaaccgccttgagcagcttggccacggccagggaggtcaactcttcagcagactccaccagaatggcgcggtcggcgcccagggccagagcggtacgcaactgctcttgggcagtggtcgggccgatggacaccacgacgatctccgtcgccacgcctttctctttcaggcgtacggcttcttccacagcgatttcgcagaaagggttcatcgacatcttgacgttagcaaggtcgacgccggaattgtccgccttgacgcgaactttcacgttgtaatcgacaacgcgtttgacagctacaagaaccttcatggattcctcgttactctccggtgaaaagaaagtcgcctaggcgaacctggcggttgatgctcatcggcacacaagggcacctccaaagacctcggcagtggccttgcacacgggaaatgacgaccgttcgtcagtggtgactgagaggtcattctttatcgcggcgtgtaaactgcgccccaacgtttgggtgcgcatcacctttattgccttcggcctgtctttggacgtgctcttgaaacctgcagtctgcctacgggaagcgcaaaaccgaccgtatcttgaccggaacgcctattctggtcaatacggcaaaatggtcagtcataagccccgttgctttgatttatctaggctgcaggcaattcaaacaaacgtttgtattggacgctgtcagtggtctatatataatgcgccacctagagagacaggtgggtgctgccttcgcgcagaaccacaccgaacctccacccattagaaaaaaaagcctgttgagccttgagtaggagatagcctgtggaacgcgaatacatggaattcgacgtggtcatcgtcggcgctggcccggcgggcctgtctgccgcctgccgactgaagcagaaggccgccgaagccggtaaggaaatcagcgtctgcgtggtcgagaaaggctccgaagtcggcgcccatatcctctccggtgccgtgtttgaaccacgcgccctgaatgaactgttcccggactggaaagcactcggcgccccgctcaacacaccggtggtgcgcgacgacatctatgtgctgcgcagcccggaagcctccaccaaggtgcccgacttctttgtgcccaagaccatgcacaacgaaggcaactacatcatttccctgggcaacctgtgccgctggctggcccagcaggccgagaacctgggcgtggaaatctacccaggcttcgccgcacaggaagcgctgttcgacgagaacggcgtggtacgcgggatcatcactggcgacctcggcgttgaccgtgaaggcaagccaaaagacggcctatacaccccaggcatggagctgcgtggcaagtacacgctgttcgccgaaggttgccgtggccacatcggcaagcaactgatccagcgcttcaacctggacagcgacgccgacgcccagcactacggcatcggcctgaaggaaatctgggaaatcgaccctgccaagcaccagccgggcctggtggtgcacaccgccggttggccgctggatatcatgggtaacgagaacaccggtggctcgttcctttatcacctggaaaacaaccaagtggtggtcggcctgatcgtcgacctgtcctacagcaacaccttcctgtcgccgttcgatgaattccagcgcctcaagcatcacccggtgctggcccagtacctggaagacggcaagcgcatcagctacggcgctcgcgcgatctgcaaaggtggcctgaactcgctgccgaaaatggtcttcaagggcggcgcgctgatcggttgcgacctgggcaccctcaactttgccaagatcaaaggcagccacaccgcgatgaagtccggcatgctcgccgccgacgccgtggccgaccgcctgttcgccgaatctgaaggcggcgacgaactgaccacctatgtcgacagcttcaaagccagctggctgtacgaagaactgttcgccagccgcaacttcggcccggccgtgcacaagttcggcgcaatcatcggcggcggtttcaactggctcgaccagaacattttcggcggcaagattcctttcactctgcacgacaccaagccggactacgcctgcctgaagctggccaaagacagccagaagatcgactaccccaaacccgacggcaagttgagcttcgacaagctgagctcggtgttcatctccggtaccaaccatgaagaagagcagccgtgccacttgaagctcaaggacccaagcatcccgatcggcaccaacctgccgctctacgatgaaccggcgcagcgctactgcccggctggcgtgtatgaagtggtgaccaaggaagacggcgagaagcgcttccagatcaacgcccagaactgcgtgcactgcaagacctgtgacatcaaggacccttcgcaaaacatcacctgggtgacgccggaaggtgcgggcgggccgacttacccgaatatgtaagtcgttcgtttggccaaaaaaggctcccgagatgggagccttttttgtgggcgacatcgatcaaaatgtgggagctggcttgcctgcgatggcggtcttcaggtgccaaatgtatggctgacacaccgctatcgcaggcaagccagctcccacacagaccgtggggtgtcaggccgcccgctcttcgcccgggttgcgcaggaagtagcgtttgtattcccgactgaactgcgacgtactctggtaccccaccttgtgcgccgcctgcgccacactcatgccttccaccagcaacaactgctgggccttcaataaccgcaagcgcttgaggtactgcaccggtgacaataaggtgcagcgtttgaaatgctcatgaaaggtcgaggcactcatgtgcgcaaatccggccaacgtctcgatattcagcggctcggcgtaatgggcatgcaggtgattcaatgaggtggcgatgcgcgaaaactgcccctgctgttccaccagcgcacgcaacacatcagcctggggcccgcgcaaggcggtgaacaacaattcgcgcacccgcgcaggccccatgatccggctttccagcggatcgtgcaggcactgcaacaaccgctcgacgcagccgcgcatcgcatcgtccagcaccaccgaactcatcgactccaaggtctgcgcggtcggcggcggcccggcctgcatgcccatggcgatcaccagctcgcccaacaccacgcggtcgatgcctaccgtgacgccatacagcggcgcctcgggggccatggcaaaggtctcgcattcgaacggcaccggcatggcctggatcaggtaatgcccggcgccatactccagggtgcgcgggccaaggtaggcgaccttgctgccctgagccacgaacatcaggcttggctcatagatctgcggcccacgcgccacatcgcaactggcgcgcagcacctgcacgccgggcaggtgggtcggggaaaaaccatcgcggggcgtgagcccttcgatcaaggcaaccagcgtggcattggcgtccaaatggcgggtcaacagcatggcaaaaaacttcgcgaatgagggatgacagcatcatcgcaggtctggcggccaatatatccaaacctcaggcactgccggacgaataggcatgagactcggagcaattgccatgttcgcgccaggggccggcgcgcagactttgccgcctctgcagtccaagcttttgtgaggtttactatgtacaccgccatcggttacgccgcccagtcggccaccacgcccctcgccccgatgtcatttgaacgccgcagcccgcgcgtcgatgacgtagccatcgagattctctactgcggcgtgtgccactccgacatccaccaggctcgcaacgaatggggcattgccgtgtacccgctgatgccgggccacgagattgtcggcaaggtcactgcggtcggcgccaacgtgaccgcgcataaagtcggcgacctggtgggcgtaggctgcatggtggactcgtgccgtcactgccaagcctgccaatcagaccttgagcagtattgcctcgaaggcccgaccatgacctacgccacgccggaccgcgtggatggcagcaacaccatgggcggctattccgacagcatcgtggtcagtgaacactttgtggtgaagatcccggccaagcttgacctggccagcgctgcgccgatcctgtgcgcaggcatcaccacctactcgccactcaagcactacggcgtaaaggccggcgataaagtcgggatcctcggcatgggcggcctgggccatatgggcatcaagttcgccaaggccatgggcgccgaagtcacgctgttcacccgttcggccagcaaggccgaggaaggccgtcgccagggcgccgaccatgtgatcgtgtccaccgatgccgagcagatgaaagctgctgcggggtacttcgatttcctgctggacaccatcccggtgcagcacgacctgaacccctacctcgatgtgctgcgctttgacggcgtgcatatcctggtcggcctgatcgagccggtggacccgcccgtcaacgccgccaagctggtgctgggccgtaaagtcttggccggctcgctgatcggcggcattgccgaaacccaggaagtcctggatttctgcgccgagcacaacatcacctgcgacatcgagatgctcgacatccggcagatcaacgaagcttacgcacgcatgattgccggtgatgtgaagtaccgctttgtcatcgacatggcgagcctgaaagcctgattaggctttggcgcccaactccgctgacagccgggctgcgacctgtttgatcacagggatcagctcggccattttctccagcggcatgtagggcaccgtactggcgatgctgatgccggcgacaatgcgcccgctggcatcgcgcaccggtgccgccacgcagcggatcgaaggctcgttgtcttccaggtcgaacgcgtagcccccctccacatactcatgcatgcgctgttcgaactgcgcccaggattgctccgggtgctgcggccattgcaggcttttgcccgccgtcggcaagctcgcctcgtacaagcgctgccactcctgcggtgaatcatcgagcatcaacgccttgccgataccggtgcgcgccagcggcatacgatggccgacccgcgagcgcatttccgggccgttgcgaccggggttcttgtgcaggtaaagcacctcgtcgtattcacgaatcgccaggtgaatggtgtcgccggtcagcgccgacaactcgtccaggtacggcaccgccaggttcaccaagggcaattcttcacgggcctggaaccccaactcgatcagcttgggccccagcagataaccgacctggggcaccacgcgcaggtagcgctcgtctaccaggcaactggccaggcggtgtgtcgtgctgcgcgtggtgccgatgcgccgggcgatctccttgagatcccgcgcaccggccgccaccgcttgcaccacgcccaggccgcgcaacagggtctgggtgccggtgggggcggcgtctttgacgggggtgtgggcgttttcctgcatatcgggcctataagtatgaaagcgggggcattatggcaaataccgccctcctgaacacaggagatccaatgtgggagctggcttgcctgctcccacagtttgatcttcacagggtgaacatcagcgttgtttcatgcggtcgattatcaccgccagcaacaggatcgagccacgaatcacatactggtaaaaggtatcgatgttcttcaggttcatcgcattctcgatgatcgccagaatcaacaccccagcaatcacatggcggatcatgccgataccgccgctcaacgacacgccgcccagcacgcacgccgaaatcaccgtcagctcgaaaccctggccaatcatcggctggcccgaggtcatgcgtgaggcgaggatcaccccggccaaggcgccgatcaaaccgtgcgtggcaaagatgatgatcttggtgcgatcgacattcacccccgccagcaacgcggcttcctggttgccgccaatggccatggtgttgcgcccgtaggtggtgtaattgagcagccagccaaagaacacaaagcacagcacggtgatgatgatcggcaccggcacgcccagcagttggccgttgccgaacacgaagaacccttcattcatcacccccaccgccttgccgttggagaagatgtaggccaggccgcgcacgatctgcatggttgccagggtggcaatcaacgcgttgatgcgcagcttggcaatcacgatgccgttgatcagccccaccaccaggcccatggccaaggctgccgacacgccgagtgccacgctgtcggtgtcgcgcatcacgatgcccgccaccaccccggcacaggcgatcaccgaacccaccgacaagtcgaagtgccccgacgccaggcaaaacagcatggtgcaggcggcgatgcccacggtggaaatcgccagaccgaggccgcgcatgttcaacggagacaggaagttatcgatgaacaccgcgctgagcacaaaaatgcccagcgccgccaaaagcatcacccaatcatcgagaaatttgcgctgattgaaacccggccagaagccctttgctgtttttacctgagacatagccaaaccctcttgttcttgttcaagcccgcgactgtggcagcgccagttgcagcaggcgcgcttcatccgcttgggcgcggggtaactcaccggtcaaggcgccttcactcatcaccaggatgcggtcggcaatgcccatcacctccatcaggtcgctggacaccacgatcaccgcaatgccgctggccgccaggttatggatgatctggtagatctccgacttggcgccgatgtcgataccgcgagtgggttcgtcgagcagcaacaccttcatcggcatcgacaaccagcggccaaggatggctttctgttggttgccgccggacaggtacatgatcttctgcgctgcgttcggcgttttgacccgcatcgcctggatctgccggtcggcgttacctttctcccagccttcgcgcaacagccagccaaaggtggaatgggcgccacgggcgctgatgttgatgttttcagcgacgctgcccagcgggatgatgccctctttcttgcggtcctccggacacagcaataccccggcggcgatggcgtcgcggggtgagcgcagttgcagcgcttgcccgcacagttccaggctgccggcactggcgcgctctaacccactgagcaggcgaaacagctcggtacgccccgcgcccaccagcccgaacaggcccaggatctcgcctttgcgcacttggaaactgagcggttcacgcaggccgggaccgagcaagccgtccaccttgagcgccacttcgcccagctcgcgcgggcggtaatcgtagatatcctggatatcgcgaccgaccatgcaagtcaccaactggtcatgggtcagtgtgctcatgtcctcgaaggtgcgcacgtagcggccgtccttgaacaccgtcaccgcatcgcaaatacggaacacctcctccatgcgatgggacacgtagagcaccactttgccctcatcgcgtaggcgcgcgatgatcgccatcaagcggtcgatttcccgcgccgataaactgctggnnnnnnnnnnnnnnnnnnnnnnnnnnnnnnnnnnnnnnnngagccgaagaaaccgctgtcggctttcttcaattcgccgatggcgtcggtgccattgatgccgatgccgatcacgttggcggccttgaagccggcgctctcagtggcgcgcacgccaccgagcacggtgttgtcgttcatgccgccgatgatcaggttcttcgccccgctcggcagcttgaccagggccgagttggtggcgtccatgctgccgggcacatcgagggttttcagcgcagcggtgaggatgtgatccttcggaataccggcctcctccagggatttgatcgagccgtcagtgcgcttcttgccggtgtcgagctcgttgaaagtgttgatcaccgcgtaggtgtccttccagtcccaaccgcgttttttcgcttcggcggccatggcagcgccctgcttctggcccacctcaaatgcggccatgcccaagtacggcacctcttccataaagttgcctttggcatcgacaaatcggtcatccacggccatcactttcaaatcgttgaccttggccttggcgacgatggccgggcccagggacacgtctggcgggcagatcacaaagcctttcgcgccgttggcggccaggctgtcgatagccgacaaggtcttttcaccatcgggcacggcgattttgatcacggtaaaaccatgctctttgccggccttttccgcgaatgcccactccgtttgaaaccagggttcctcagcctgtttgaccaggaaaccgatcttcacttcttcagccgatacccagccgctgaacgccatcgccagtgccacggcaccgagtgtttgcttgaacatggaccacctccttcttgttattgaaaaacgctttagtcgtggtacatcacagaccgcccgccatcgatcatcaggcaagtggcattgataaagggcgcctcgtcggtcgccaggaacagagccgtcatggccacttcgatgggctggccaatgcgtttgggcgggtgcaggtcgaacgcgcgctggcgttcggcgtgggggtctgggaaaccgttccagtaatcgacgttgagctgggtttcgatatagccgggggcgatggcattcacgcgaatgcccttgggcgcgtactcgatgcccaaggcacgggtgaggccgagcaggccgtgcttggcgacagggtaaggaaaacaaccgggaatgatgtggctggaatgggtggacgcgatattgatgatgttgccgatgccctgctcgatcatgtgcggcaacaccgaacggcagccgtaccaggcgccgtcgaggtcgatggcgaaacagcggcgccagtcctcgtcgctcatctccagcgggtcacggaacacattgaccccggcacagttgaccagcacatccacgcggccaaagcactcgatggccaggttgaccagtgcctgccattgttccttggaagtgatatcaaccggttgggcgtaaatctgcgcgccgcgttcgcgccaatgggcggcgaccttctcgactttgtcgccctggatatcagcaatgatcaaccgcgcctgctgagcctggaaacaggcaacgatggcttcgccaatgccttgggcggcgccggtgatgatcaccaccttgttcttcagccgctcgccgtaagtgggctcgggcacggcgggtagggacaacggatgtgcctgcatcgcttcacctttttattttttgtagtgagtgctgatgctggcgactataaacccatcgactgaaatatctcaatatataaattatcgtcccatataatgagcaaatctaaaaatgtgggagcgggcttgctcgcgaatgcggtgtgtcagttaaagcatgtgctgactgatacaccgtattcgcgagcaagctcgctcccacattgggtctttagggactttacgaaagaagcttcagcccagggcgaagtcgcgcaaggcatcgccttccatgcgataacgcacccattcttcctgaggctgggcgccgatggatttgtagaaggcaatcgcgggctcgttccagtccagcacgctccactcaaagcgcccgcaaccgttgtcgcaggcgatcttggccaggtgacgcagcaacttcttgccggcgccaccgccgcgttgttccgggttgatatacaggtcttccaggtaaaggcagttactacccagccacgtggagtagctgaaaaagaacaccgcaaaaccaatcggcaatccatcgcgcaagcagatcaggccatgggccgtggcaccttcgctgaacaggctgcgttcgatgtccaccacgctggcgatcacttcatgccgggctttctcgtactcggccagctcagtgatgaaggtcaggatttgcgcagcatcgctgggcacggcggggcgaatctcgatggtcatgggcgagccttgggcaaattcaaaggccacatactaaggcgatttgatggccgtttgcagtgcaattgatgccgacgagcgcgtttcactccggtgcggggtgatgcaagcatcggcaaccacagaacaaagcctgcgcacgcccatggtaaacaatgggcataaatccaacgatcagagacctgctcatgcacgccacgccaccagtgggcaccaagacattcgcgctgttctgcctagccagcttcctgctgtcactgtcttacggttcgacctttttgttgtcactgctgatccatgcccgtggcggtaatgaacacgacgcgggcagtgtcattgccacggcgatgctcagcacttttgtggcggtcgtgttttccgggcacctggctgatgcgctgggcgcggcgcgagcaattgcgagtaccggcctattgttggtggtggcctgcctggggtttgccctgacgccggggtttggccaaggcttgatgctgtttggattgtcccttggcttgggctggggcgtgttctataccctgggcccaatcatcgtgacgctgctagtggaaccacgccagcgggccaaatatttcgccttgctctcgggcagtatgttgagcggcataggttccggccctttgctgggacgcgccgccactgcgctggacctgcccctgaccaccgcgttctatatcgccgggctcgccagcctcgccggggtggtgatgttctggcgcatgggctcccggttgcgacagcacgcgaatatgccaaccgccaggatttcctggcgcgcaagccgccgcatactgtcttccaaggcggcgttcgccatcctgatggtcggcctgggtggctgcgtattcgggggactgtcttcgttccagaccagctatgccgtggctcataagctcgactattcactgttcttcgcgggcttcctgacagcagcaatcaccagccgcttgctgatcgcaggcttcgtggtcaagcgcgatgcgtaccaggctgcctgtgtgttatcgggggtgatgttcggcgcgatcgcgctgttcgcgtttggtgtcagcggcaacctcagttatgtgctcgccgccgccacgctagggatcgggtatggcctgacgtattcagtgatcaacggcctggtggccaacgaagcgcccagcggcaccacttcccaggcgttgttgttgttcagcctggcgtactttatcggcgtcttcgggtttccctggctcgcaggcaagatcatcgtcgacttcggccttgcgacaatgatgctgagcgtactggtgatcgcggccctcaactgggcgatcacggtggcacgcttgatagcgcgccgagtatcggcacacaaagtgatacaggtgagctgataccgttcgtcgccctcccggcacgatcaacaatcgcgggcagaccaatacagggtaaggacattaatcatatggagacaccctgatgaaaaattccaaatttgctgccctcgccctcaccggcctgttgtctgccgcgtccctgagcgccttcgcggccagctcgaccaccggccccaccgatccaacgccggacgccaccaccgagtcgcaaaaatccatgggcaccggcatggacaccaacggtggcgcgatcatcgacaacagcgctgacccacgcaccaaaggcaacgatacccagcgccaggcaccggcggccgtgggcaacggcaagatgggcccaggcacgagcaacaatgagccgaagatcaacaagggcgacgactcgaacatcccgggcgcgcagaaacaaccagcgccttgatgcacccttggtacgacctacacccgaccatttccccgtgaagaggtacgcatgaacgtcgatagaaaccttgaaaaagaagtcctcacccgcctgctgcacgcccacccgcaaggcttgggcaaggaggtgctggacaattaccgcggtgaaaaagaggtcgccagtgtcttggcgttcctgcaagaccgcgggctgatcaaggatgggcatgtgaccaccgacgacgccggcgaatacgcgttgaacctgccgatcaagctcaccgcttctggtgtggatgaagcgcgcaagctcgacgcccaaagtactcagtaatccatttctggcctggccccgcgactggggccagaaggagttttagcgatgcctcgtggaagcaaagccaaatacaccgacgaacagaaacgcaaggccgctcatatcgaagacagttatgagcacaaagggttgcccaaggacgaagccgaagctcgtgcctgggccaccgtgaacaaacagtctggcggcggtgagaaaaccggcggatcaggcaggcgcaaagcaccgaccaagaaggcccaggaccggcaggaatcggccaagcgcgccgctgccagccgtgaaggccacccgcgcagcagtcgcgcttcattgggtacgcagaccaaggaaagcttgatgaaagaggcgcgggaaaagaatatttcaggacgctcaaccatgcgcaaagatgagttgatccaagccctgaaaaaagcaggctaaacgcagaacccattgtgggagcgggcttgctcgcgaaggcggagtatcagtcagcacatgctttaactgacacaccgccttcgcgagcaagcccgctcccacgtttttgggcctcgtttattcagccactaatgcatcgacctcagcagtgccgggcgaggtcgctggcccccagcgggttaccgccaatgccgccgctgcgttcgctcgacgcgccgcctcaaccggtttcaagccattcgccaacccggcaataaatactcccgcatgtgcgtcccccgcgccattgctgtccacggcctgaaccttgaatccagggacatgctcgatctgtgcccctcgccctacccagcaaccatttggcccatcacgcacaaccagcagtgcctgcaagtgctgattgagcatgggcagcgcctgactcatatccgccgccccggtaaacgccagggcttcagggccattgctggtccagatgtcgatacgcggcaacaacgcgcgcatcaacgcggagtccagcgccttgaccatcgggcctgggtcgaacaccaccacgatctctcgcggtagcgcctgcaaccagtcaagcaaaggctgcgccttaccttcaagcagcaagctgtagccactgacgtatacgtaatcatcgacacgcgggacgatccgagccaagtcgtcagcgctcaactcaccctcggcgccgagatgggagatgaaggtgcgttcggtgctggcttcagtcagcgacacgcacaagccggtgtctttgcctgcgctggccgccaaggccatttcaataccttcggcctgcatcgcggcacgcgccagctcgccaaagcgcccctcgccatggcgacccaggtaaaccaccgacaacccattgcgccgcgccgcagccattacgttgaaaccaccacccacttgaaaactggcggagttggccagcacgtcaccgccgcttgccggcagggtgtcgaggcccatgaccaggtcgacaatgacctggccggtgtgcagcaatctagacattggcgctctcgactaaagccggacgacggtcagacgccccgcccaatactgcatatattccgcccgctaccaggaaggttacgatccagcccaggccgttatggcccagccaggagtcggacagcggcccggcaaaccagatgttttcggcggtggtgccaatggtggtgaagctgaaccccaacacaatggccaccgcccaggcgccaaatgcgcgccactccacgccgccgcgataccagtaggcactgctggggctgacgtccagcaggtcggtggggctgtagtaatgccggtgaatcaagtcgaccacgaagatcccgacccacgccgtgatcggcaccgccagcagcgaaatgaaggtgatgaacgggccataaaagctgtcggcgatcagcatgaagtagatggagccggcaaagatcgcgacgatatcgacgatcaccgcatgcacgcgtttgaccttcaagcccagggtcaaggtagtgagaccggccgaatacaccgacaggttgttcgacagcaacagcccgccgaacgcggtgatcaggtacggcacggccatccaggtcggcagcatgtcgcggatcgcgatgatggggtcggtggccgacgccaggtcattgttgcccaccgacaacaggccgccgagggtgatcaacagcaccagcgggatgcctgcgccaaacgcagcggaggccaccaggcgcacggccttgacgctgcggtgctggtaacgcgacatgtctgcaccggcgttggcccaaccgataccggtaccggcagccatggtgcccacgccaatgatcatcgcgctcaacggcgcgggggtggcgttgaacaccgcgctccagtcgatagtggcgcaaagaaagccgcccaccagaatgttcaagccgccgaagacgtaggtcgcccacttctggatcaccagcaacgtggcgtggcccaggcccgatacggccagggtcagcagcacgaagatggcaatgaagatcagggtgagcaccggcgcgcttttcgcctccactgccgagccgaacaggatggagcttaatgacagcaacacgaaggctgcggtggtggtgttgacggtttcccaacccaggcgcgacatcagcgacaccaaggtcgggccgatattgccgcgcaccccgaagatggcgcgggacaaggtcaggctgggcgcgcgaccgcggcggccagcgatggagataatgcccaccacggcaaaggagccagcggcgccaagaatcgcaacgatgatcgcctgccagatggccaggccacgaaacgccaccagcgtcgcgccaaggggcaaaccgaggatgctgatattggccgcaaaccacacccagaacagttgcagcggatgaccgttgcactcgccttccgggaccggctcgatgccgcgtgtttccaattgcccagcgctttggccggaagaggggctgctcatgaaagggtgctcctggtgcctgtattgttgtggttgtggcagcgagtcgaatctttatccggtcttcctgacccaacgctttttaatgtgggagctggcttgcctgcgattgcggtggggcaaccagctcatccgccactggaaaaccgctgtcgcaggcaagccagctcccacaattagttccgtgtttatcgcaaggccaataaggctttgaccagcggctgcaagtccaggccattgactcgcttgacctgttcaaccaacgcctcaggccagcactgcatgcccaggcacgcccccagcatggcgccgaggatcgcggcaatggtatcggtgtcgccacccagactggctgccaggcacagggcttcgaaggcgttcatgtcgcccgatgccacttgctgcgccagggcaaacgacaccactaccgattcctgggaagccaccgaagtaccaatcaactcgtaaagcaggtcggcaaacaacgctttatcgccgctgccgacgcttagagtacgagcccaactaatgcgggtagaaatgcgtccacccgcgatccagtgaccatggctttcagcctgccgagccatttgggtcccgatattcagggcttcccccaggtccacgccattgatgccggccgagaccactgccgccacggccgcagcgctggaaatacccaagctggtgttatgggtgacctggcacgcctggatcaccgcctggataaaccgccccgggtcgctgacatcagcggcgacgcccaccggggtgatgcgcatggccgcgccattggtggtgccgtagcgcccggattcctccggggtatgtccggcgaggatcatgtcgatcgcgcgcttggtggacggcccgagcaagtcctgggagcctttggcgcgcatgcccgcttcccaatcgatcaagcgttgggcaagcacagcgggctggatctggccctggccttgcaccaataactcggcgaccagaatggcttgctcggtgtcatcggtgatggagccggcaggcatgttcggtgcaatgggctggtcggcgtcggcgtcttccagagcggtgatggcaccgaagcgcttttgtacctgctcgcggctcaaggattgggtgggcatacccaaagcatcgcccagggccaggccatagaaggcgccaagggcgcgattttcgcgggtcatttcgacgctccaaactgcagatgcaggcgaaagtgcagcgggtcgagcaggctttcgacatgttccatgaaacgctcgcgacgatcataggtggtgcgcgcagccttgagaaatactgtgccgctgggacgcccgagtaattcggcatcttcatcactcagcggctcggcaccgatccactgatcgccctcggccccgacgtagccgtaggcggccagggtgatggtcaaggagttatcgatcaggccaatgcgcggcaggctttccaggtcgccaacggccggcatcagcgagcgttccagggacaccgctgtgccgtctgcggtgcgccgaaggcggtcgagggtaatgaactggtcggtgccgaaacggctgaacagatcagggcgcgtgacggcctcgaaacgcaggatgtcagtgcttacctgggcgcccgtatcggccaaggcctgggcccaaccgctgcgttggtccagcaccatgccgtcaaaggtgacgatcgagccgaccccactttgggtggcgatgtagttgcgacgcttgagctcggacagcgcctcacgcagcgtgccacgactgaccgcaaattcctcggccagttgatgctcgccgggcaacaggaagccgtcggccatgaccccaccctcgatacggcggatgagttcgtcgacgacgcgttttttcttatcaaatcgaacatgtctaatcatgtacaaattgataaccgaaagcgcgcatttaccgcaagaggattatttcaggctgaagacaaaaaccgcctcagggctccaggccgatggggaaaaactccccgctgctccatacgccaagccagttttgaccgttgatcggacggctcacggccagctccaccaactggtaaaaagcgttgcgatgcacgagggcttcaagattggtgcgaacgcgcacgtagggtgccggttcctgggtgacggggtcgatcaccacccgcagcgggtgctcgaggcctgcctcgacctgttcatcgacgttggtggtaaagcgcaaaacctggctttcgccctgcccttgcacgtccagggtcatggcgacaaagggcgcatcatcgacctggatgccgaccttctccaccggcgtcaccaggaaataatcatcgccatcgcggcggatgatgttggagaacagcttgaccatcggctttcgcccgatgggcgtgccctggtagaaccaggtgccgtcacgggcgatgcgcatgtcgatattgccgcagaaagccgggttccacagatgcaccggtgccggccctttgcccttgggcagttgggccaataaatcattggccttggcggaatcggtcatgacgggctcctctgtttactgattgctcatgcccagtaaaccgcgggcatattgcgccaggggacgggcaatcaaatcttgtggcgatgtgtcgtggaacgtcagtaaaccgccacgactgcgaatacgtgcagtatcaatcaaatactgggtgctggtctcgatcaacatgacttggatcaccccgctgtccaggccaaggcggtccagagcttgttggtcggtccactcgtcggcgttgccgatgcggtcatcggctgccgcaaagcggcaatacagcaggtagtgagcaccggcgtcgcgggcttcggccatggcctgttccagcccttccggctggcgggcgcggcgcaccatggggaaatattcgacgaagccattgaatgcttcctcggccaccacattgggccgcgggtaggcgctgcccggcggcacgaaggcgccttgggcgataaacacaaaggagtccggctgtatgcgcaccgaggcagtacgccgcgtatcgctgtggtcgagcagcccggcatcgctcatctgatagcgggtgccttcggccatatcactgacggtcatacaaccgcccagggccaatgacgccagcagcaaaaccagactacgcatcctaatcctccagnnnnnnnnnnnnnnnnnnnnnnnnnnnnnnnnnnnnnnnnggcaccatgttgaccttgatcttgatcccggcagcactggcctgatccatgccatcgagcaccgtggccaggtcgccgccacgggcgatgctgcggaaagcgtcggcatccagagtgtcgagggagacattgatgcgccgaatgccggcagccaccagcaacggcagtttgcgcgccagcagttggccgttggtggtcaggctgatgtcgctcaggcccatctgccctaccgcgcccatgaaggcttccagcttggggctgaccagcggctcaccgccagtaatgcgcaagcgctcgatacccgccgcttcgatcaggtaagccacgccccgggccatggcttgggccgacagttcatcctgggcagccaccagccgcttgccgtcgggcacgcaataggtacacgcatagttgcaggctgaagtcaggctgatccgcaaattgcgaaaacgcctgccttgacgatcaacgatcatggatcactccggcagaggataattcgggcgcgctaaaagctgactcataactcagcttttagcaaggtccttgcctgagtatattcctgggttactgcgcctggcagcaaatcattgcgccatcactgtggcgaataacttacgtggcaggggtttcgccgctcttctcgacgcccggcagttccgggctgtgcttgcgcttgttgcccatgcgcacgccgatgtccatcaggaattggaagaaaccttcctgatcttccagcacattgctccagaatggcgagtggtacagcgccacagcgccatgcaccagggcccaggcggcgcagtagtggaaatacggaggcacgtcttcaagcttgccttcgctgatacggcccttgatcagcagggtcagtcgttcgaagttcgaggcgcggatcttgtgcagttcctcgaccatctccggcacttggtgacctttgaccaccttctcttccaggcggtcgaacaggcgatagcgctgcgggtcacgcatgcggaactcgaagtaagcgcgggacagggcttccttgtctttgtcgacatcggccgagtgcagcaactcgttcaaatcgcgctcgtagtcgagcatcaggcgcaggtagatttcggccttggacttgaagtgtttgtagatcgtgcctttgccgatacccacggcatccgcaatcatctcgacggtgacgctgtcttcaccttgttcgaggaacagcttgagcgcggtgtcgagaatttcctgctcacggcggcgaaactcacggaccttacggggttctttgtgcatgaggaagagtctgcaaaggtcggaaatagggagggttgcgcagcgccatggatacgtggcgatacgatttacccgatgcgagggattatcccgactgaacggtcgttgggcaatgtctatgtgaacccgccaggcacataactttcaatgcgccaacgatttcgtggttatcagtcagaaataatacgcaacatctgaacccgcccatcagcgcaatgagaactcaagcgaaggcggcgtattccaaatctgtttaaaaaacgatcaatcacgactggactgaatgggatagtggtcaatacttcaactgtcggcgcgacatctcccccaagtgacgcgtcgacctgggtaccgacggactgcgtgcccttgttttactcctaatggtcttagcccggattcaccccccagaacccgggttttttttgcctgcgattcggccgctttaacctgctacgtgagccagcgggaacaggcgcttgaagttttcagtggtctgctcggcaaaacgctcgtaaggctcaccgcgcagcatcgccaggtaatcagccacgtcacgtacatattcgggcaggttcggtttgccgcgatgggggatgggtgccaggtacggcgagtcggtttccaccaacaggcggtcggcaggcacctggcgggccacatcgcgcagcgcgtcggcattgcggaaggtgacgatgcccgacagggaaatatagaaccccaggtccagggccgccttggccatgtcccagtcttcggtaaagcaatgaagcacgccagcctgcggcaacgcggcttcacgcagcaaggccagggtatcggcacgggcgcctcgggtatggacaatcaccggcttgcgcgtctgctgggcggcttgcaggtgcaggcggaacgaggcctgttgcaactcggcagcttcaggctcgtagtggtagtccaggccggtttcgccaatagccacgacccgcgggtggttgagttcacccagtaaccaatcgagcgccggggcttcgccaggcttgaggtcaagcgggtgaatgcccaccgagcaatcgacgtcggcgtagcgatcagccagggctttgacgtcggcggcgttgtcggcgctgacgccaatgcacaggaagtgccctaccccacgctggcgggcagcttcaagggcggcgtcgagggagccgccgtgctgggcaaggtcgaggcgatcaaggtggcaatgggaatctacgagcataggaatcagggcttaagtcacaaaagaggtagggccaacgatacacccgtcggccacggaatttaacggcgcccgagcaggcctacccactgcaccagcaatgcctcgagcaacagcacgcggttgaggttggccttgccgaggactttctgacgctgggcgaggatccagtcctggatgttgagcactttgtcctgggcacttttttgcgccaggtattgcacgaccttgcgcatatccgccaggcccaggccgctctcatcctgggtaagctgatagcgcaggatcaggctggaccagtcgcagaaccagtcgaacagcagcaacagcggaatgtccttccaggcgctttcggccagttgcgtggcggacagttcctgcttgagcagtttcttcacgccatccacgaccagtgcacgctgttcgcgcacgccctgggcctgcagcttcactgccgccaaaggcgaaccggccgccagggtcagcaactcgccgcgttcttccgcgctgcattccggcaaggcctgcgccagccattgcaggctcatggcttcgctgggcaacgggcaagcctgctgcacgcaacggctgcgaatggtcggcaacaagcggctggactggtggctcaccagcaacagcacggtatcgccggacggctcttcaagacttttgagcaaggcgttggccgcgttgatattcatcgcctcgaccggctcgatcagtaccactttgcgcccgcccatctgcgcggtctgcaccacgaagctgaccaggtcgcgcacctggtcgaccttgatggccttatccgcttcctcgggttccagcacatagttgtccgggtgactaccagccttgagcaacaggcaggacttgcactcgccacacgcctccagattgaccgggcgttggcacaacaggcggcccatcaggcgttcggcgaggtggcgtttaccgatgcccactggaccatgcagcagataggcgtgggcatgctgggcgcgccccgccagttgctgccagagtccgtcctgccacgggtaggactcagccacggttacgctccaacagggtgggcaacagcgcgtcgatggactgttgcacctggctcagcggctgggcggcgtccaacaggtaataacgtgcgggctcagccttggcgcgctgcaggaaggcactgcgcaccgcatcaaaaaagccctggtcttccaactcgaagcgatccaggcgacctcgcgccctggcgcgggccatgcccacttccaccggcaggtcgaacaacagggtcaggtcggggcgcagatcgccttgcacgaaggtttccagggtggcgatgcgctccatggacaagccccgccccccgccctggtaggcgtaggtggaatccgtgaaacgatcgcagatcaccacggcaccccgcgccagggctgggcgaatcacttcggccaagtgctgggcccgggcggcaaacaccaggagcaactcggtgtccgcgttcatcggctcgtcacccggggccagcaggacttcacggatgcgctcagccaaaggcgtaccgcccggctcacgggtcagcaccacctcgatgccctgcgcacgcaggcgctcggccaggtagtcacggttagtgcttttgccggcgccttccgggccttccagggtaataaacaagccagtcacaggcagtccttagtcagagtcattgcgggctttgcggcgcggtagtgtccggcgcgggctcgatcggtgcgtcgggggtgggtgcatcgctggaaggtgccgaatcttccagcggtttcaccaccggggccgggctggaacggtaatcggcacggcgcttgagctggaactcacgcacggcggcattatgcgcatccaggttatccgagaaaatatggctgccatcgccacgggcgacgaaatacaggctgctgcccggcaccgggttcaacgcggcatggatcgcctcgcggccgaccatcgcgatgggcgtaggcggtaggccggcgaccatgtaggtgttgtaggggttggcttccttgaggtgggcccgggtcaatttaccgttgtagcgctcacccaggccgtagatcacggtggggtcggtctgcagcagcataccgatcttcaggcgacgcacaaacacaccggcaatctgcccgcgctcctggggcacaccggtctccttttccaccagcgacgccatgatcagcgcttggtaagggtcggtgtagggcgcgtcggcagcccgcttgctccactcctgggcgagtacatcgtccaggcggttgtaggcttttttcaggaattcgacatcggtcatgccgcgaacaaaacggtaggtgtcggggaagaaccgcccctcaggaaacacacctgggtggccgagcttatccatcacttcgctgtccgtcaggcccgccagggtctgcacgatcttttcatgcttggccagggcggtgcgcacctgacggaaattccagccctccaccaaggtcaggctgtactgcaccacttcgccgcgctgccacaggccgatcaaaccctcagcggtaaggcccggactcatgcggtactcaccgctgtgcagcggctggccttcgaggttgaagcgccagtacaggcgcagccaaaaggcatcgtcgagcacgccgtcggcttccagacgattgaaggtgcccgtcggcgtagcgccagcgggtacgtcgagtaactgctcctgaggcagcttcaggggctgcttgagggcagagtcgagtttccaggccgaaaagcccacgagcaacgccgccgagaccaggctgatctgcagcagtaacaccagttttcgtatcaactcaaatatccaataacgcgcgaacaatgccctgcagtttacgggtgagcggcccaaccggccagctcatcgcagcgcagccacgcaccggccaaatgccatatacgctgttgcagacgaagacttcatcggcctgttgcaattgctcaatactgatgtcggccacggccaccgggacgcccagcgcttgtgcctgggccagcacttcggcgcgcattacgccggcaacgccacaacggctcagatcagcggttagtaacaagccgttgcgcactaggaaaaggttgctgaatatgccttcgatcacccgaccagacatgtccagcatcaggccttcggcatgttcggtatcttgccattcggcacgcgcgatcacctgctccaaacgattgaggtgcttgataccggccagcagcggctgctgcgccaaacgcgtggcacacgcaaacaggcgcacgccttcgacttcatgagtgggtgggtaaacagcgggcgcactgccctgcaagatgcggcgcaccggcgcgccagggttgatgccataaccgcgcaagctgtcgccacgggtaaggatcaatttgagaatcccgtcgccaagggcagtggcgaaggtcagcacttcgtggcgaatcaacccgtgatccaccgccaatgccaaacgcctgcaaccctcttccaggcgttgcaggtggcggtcgagcagcaacggctgcccggccttgacggcgatggtctcgaacaccccatcgccatacgccaggccgcgatctttcaggggcacgttgtccgctggctgaccgtcgacccagctgtgcatcactcggcgaaccggcggaacaccagggaaccgttggtgccaccgaaaccgaaggagttggaaatcgccacgtcgatcggcatgggttgcgcttcgtggggcacgaagttcaggtcgcagccttcgtcaggctcgtcaaggttgatggtcggcggagcgacctgatccctgattgccataacactgaagatcgcctcgaccgcgcccgccgcacccaacaggtggccggtcatggacttggtggagctgactgccagcttgtaggcatgctcaccgaacaccgacttgatggcctcggcttccgccaggtcgccagtcggggtcgaagtgccatgggcgttgatgtactgcacctggtcgggattgaccttcgcatcgcgcagggcattggtgatgcaacgcgcagcacccgctccgtcggacggcggtgaggtcatgtggtaggcgtcaccgctcatgccaaaaccgatcagttcagcgtagatggtggcgccacgcgccttggcgtgctccaactcttcaagcaccagcgcaccggcaccgtcggacagcacgaagccgtcacggcctttgtcccacggacggctggcacgggtcggctcgtcattgcgggtcgacagcgcacgggacgcgccgaagccgcccatgcccaggccgcacgcggccatttcggcgccgccggcgatcatcacgtcagcttcgtcgtacgcgatgttgcgtgccgccatgccaatgcagtgggtgccggtggtgcacgccgtggcgattgcgtagttaggtccctgtgcccccaggtggatggacaggaagccggaaatcatattgatgatcgagcccggtacgaagaacggtgaaattcgacgtgggccagtctcatgcagcgtacggctggtttcttcgatattggtcagaccgccaatacccgaacccatggccacgccgatgcggtcacggttggcgtcggtgacttccaggccagcgttacgcaccgcctgaaaaccggcagccaggccgtactgaatgaacaggtcgagcttgcgggactctttgatcgagagatattcctcgacattgaagccctttaccgagccgccaaaacgggtggaataggcagaaaggtccgtgtgttcgatcagaccaataccactgcggccagccagaatgccctcccaactgctcggcacatccgtacccagtggcgacaacatacccataccggtgactacgacgcgtctacgcgacacagcactctcctttttctaatgacgacacttttcatcgccgctaaagaaaaaaccgcacgccgttacagcagtgcggtttttccctgacagcaagcgacgactacaaactattacgcctggtggctagtaacgtagtcgatggcagcttgaacagtagtgattttttcagcttcttcgtccgggatttcggtctcgaattcctcttccagagccatcaccagctcaacggtgtcaagggaatcggcacccaggtcttctacgaaggaagcagtgttgaccacttcttcttccttaacgcccagttgctcggcgacgattttcttgacgcgctcttcgatggtgctcataccttgtttaactcctaatggacaaattcaggcagctggccagtgggtaagtgtatagaaagccatttcagcttttcaactgaaagcttcaccctgtacccggtcggccacctgcctataaattaagttgcagctttataacggattttagacagctcgtatgacatttttttgaagcgatccgtcacaatttaactcatgtacatcccgccgttaaccgggattgtagccccagtcacgtatgccgcaccgtcagatgccaggaaagtgaccacattcgcgatctcttgggcctggcccagacggcccagcggaatctgcgtcagcaaggcttcgcgctgtgcttccggcagttcgcgggtcatatcggtgtcgatgaacccaggggccaccgagttgaccgtaatcgaccgcgagccgacttcacgcgccagtgcgcggctgaaaccttccaggccggccttggcagaggcatagtttacttggcctgcgttgcccatggcacccactacggagccaatattgataattcgaccccaacgcgccttggtcatgccgcgcaaaacgcccttggacaggcgaaacagactgttcaggttggtatcgaccacgtcgtaccactcgtcgtctttcatgcgcatcatcaggttgtcacgggtgatcccggcgttattcaccaggatagccggcgcaccgaactgagcagtgatctgggccagtacggcagccacggactcatcgctggtcacattcagttcaagaccggtgccttgcacgccgttttccttcaaggtcgcggcgatacgctcggcgcccgaggcggaggtggcggtgccgatcacaacggcgccctgacggcccagctccagggcgatggcctggccaatgccacggcttgcgccggtaaccagtgcaactttaccttgcagactcatgcaggcttctcctaagtacgggattcaggccagtgccgcgcgagcggcagcgaaggcttcaggggtattgaggttggcggtcgacacaccgtcggcgcagcgcttgttcaagccggccaggactttgcccgggccgcactcgaccagttcggtggcaccgttggcggccagggtctggaccgattcaacccagcgcaccggcttgtacagttgctccagcaggtcgcgcttgagggtgtcgaggtcggcggccacggccgcgctgacgttctgcaccagcgggatctgcggcgcctgccagttgatggccgcgatagactcggcaaaacgctcggcagccgggcgcatcagttcgcagtgggacggtacgctcaccggcaatggcaacgctcgcttggcgccacggcccttgcaaccttcgatggcacgctcgacagccgccttggcgccggcgatcaccacctggcctggggagttgaagttcaccgcgctgactacttcgccttgcgccgcttcggcgcaggcctcgatcaccaccgcgtcgtccaggcccagaatagcggccatgccgccctgcccggccggaacggcttcttgcatcagttgaccacgacgctcgaccagcttgaccgcttcagccaaggtcaggctgcccgcagccaccagggcgctgtactcgcccaggctgtgacccgcgacgaatgcagggcgggcgccgccttctgccagccacaagcgccacagggcgatcgaggcggtcaggatggccggctgggttttatcggtttggttgagcagcgcttccggcccttgctgggtcagtgcccacaggtcgtaacccagggcgtcggaagcttccttgaaggtgtccaggatcagcggaaattgcgcgcccagctcggccaacatgccgagggactgcgaaccctgccctggaaagacgaatgcgagggatgtagacatgtaacaagcccctaatgatctggtcgtcaaaaatgctcgcgcctacggtgggagcgaacgaaactgacagattggatggtcaattgaactggccggtcacatttaagcactcccgggccaattcgcctaaggcaacagatcctcaagacggccgtgcaagcgttgcggcaggttctcttgaatctcgatcagggcccgcgcaattgcactttgaaagcccagcacaccggccgaaccgtggcttttcaccacaataccctgcaagccaagaaagcttgcaccgttgtgccgtgccggcgccaagtcggcctgcaggcgtcgcatcaggggcagcgcgagggcacccaccatacgtgacgccaggttgcgcttgaacaaagcttcaatacgcgtggcaatcatagttgccaggccttcgctggacttgagcaggatattaccgacaaagccgtcgcacaccaccacgtcagcttcgccgcggtacaaaccatcaccctcgacaaagccgatgtagttcaaaccccgcgcgccttgcaacaaggtggcggcaagcttgacctgctggttgcccttgatgtcctcggtaccgatattcagcagggccaccctgggtcgggctacgccgagcgcctcggcggccaccgaacccattatggcgaactgcaacaggtgctcggcgctgcaatcgacattggcgcccaggtccagcagttggcaatagcccttctgcgtcgggatcgccgccaccatggccggccgatcaatacccggcaaggttttgagcacatgccgcgacaaggccatcaacgcgcccgtgttgccggcactgacacaggcttgcaccttgccatcacgcaacaactcaagggccacccgcattgaagaatcgggtttgccacgcagggcaaccgccggcttttcatccatgccaatggtttcgctggctggcgtaatcgtcaggcgcgcgcgatccaccgccggatggctggcaatcagttcttcaagtagggagggttgaccgacgagggtcaggtgcagcgagggcgtggcagacaggctggcaatgcaggcctgaacaatgctgcggggaccgaagtccccgcccattgcgtcaatcgcgatgacttgagcagacaagtgattactcgtcagcgcccttgtcgatcactttacggccacggtatacgccttctggcgatacgtggtgacgcaggtgaacttcaccagtggtcttttccacagacagggtgctagcctcgagagcgtcgtgcgaacggcgcatgtcacgggcggagcgggattttttgttctgctgaacagccataattgattaactcctaaacgtttgggtcacgctttaactgcgccaatacactgaacgggttggaccgcgttacctcgtcctcgctcggctcggcctcgtcatcgagaccctccggctgctggcattcttccggatgatgagcaggcacaatgggcaaggcgagcaaaagctcctcctcgatcagtgcatgcagatccaatggatcttcgcccagttccagcacgtcataacctttcggcaacgactgggtattcgcaccctctttcaccacagcataactgcattcgctgtggatcggcagggtgaccagctcaagacaacgctggcaaaccattttgacttcggtgtcgataacgctgtggattaccacagatttacgttcatctcgttcaaaaacgaatttcgcctgcaccgtaccgacagtgtcggaaagcgggtcgcagagtctctccaaatcggccagcagcacttcaccttgaagggtggtgccacgatcagccaatttgcgcgggtcaacgtgaggtggaatcgggtcattcaacataggcgcagcattatagggatgcacccggccatgtcaaaggaaattcagccctgtgcgtcagccggtcacgtcgctagaatcggcgactgccttgaggagacgtatatgctgcctttattactcgcgtccagctcggtctatcgccgggaattactgagccgcctgcacctgccattcacctgcagctcgccggatatcgacgaaagccaccgcccggatgagtccgccatcgaactggtcaagcgcctggccgagcaaaaagcccgtgccctcgccgccagccatccgggccatttaatcattggctcggatcaggtcgctgcactgcaaggccgaatcatcggcaagccccacaccttcgaaaacgcccgcgagcaactgctggccgccagcggcaagcgcgtgagcttccttactggcctggcactgctcaacagcgagactgggcactgccaggtggactgcgtgccgttcacagtacacatgcgcgaactggatgcagaacgtattgagcgctacctgcggatcgagcagccttatgactgtgcgggcagtttcaaggcagaagggcttggtgtgagcttgttccagagcactgagggaccggatgcgactagcctggttgggctgccactgattcgactggtagacatgctgctgaccgaaggcgtacagatcccttgaaaccttcgtaaaacaatgtgggagctggcttgcctgcgatagcggtgtaccaggcgacacttatattgactgatccatcgctatcgcgggcaagccagctcccacagttttctacaccaagcttggaatttcagcgcagggatggcccctggaagcccatgtacagcgccaatttctccgccacactggcaccgagcttcttggagaagcgatcaaacggcgattcctcaaccgtaaaatccaccaactccttctcacccaccacatcccgcgccaccgaactggcactgcccaggccatcgatcaggcccagcggcaacgcctgttcacccgaccagaccaggccggagaacagctctggatggtctttatccttcagacgatccccacggccctgcttgacgctggcgatgaactgacgatgagtagtgtcgagaacgccctgccagaacgcggtttcatccgccttctgcggctggaaaggatcgaggaacgacttgtgctcacccgaggtgtaggtgcgacgctctatccccagcttctccatagcaccgacaaaaccgtaaccggccgcggtcacaccaatagaacccaccaggctggccttgtcggcatagatctggtctgcggcactggcaatgtaataggcgcccgaggcacccaggtcggagatcacggcatagagcttggtatccggatgcaaggcgcgcagacgacgaatctcgtcatacacatagcccgactgcaccgggctgccgcctgggctgttgatacgcaggaccacgcctttgaccttggggtcctcaaaggccgcgcgcaggctggtgacgatattgtcggcactggcgggctccttgtcggcaatcacgccgcgcacctcgatcaaggcggtgtaatgactgccgcgggtggcgctcttttccatgtccatcagcgggctgaacagcgccagcatcccaagcaggtacacaaaggtcagcagcttgaagaaaatcccccagcgccgcgaacgccgctgttcctggacgctggccaggagggtcttttccagcagcttccagcttttatcatcactgctctcggccttttcaggcgctttccactcgtcactcatgccatcaaccccagcaaagacttatcgggcccggctgagccaggcctgcagttcggaaaaatgatcaatcgtcagtttcggttcgtattgctgcaatgcctcggcagactgggcgccgtagctgacggcgacgctgtccatgcccgcattgcgcgccatcatcaggtcgaaagacgcatcgcccaccatcaatgcctcacgtggctttacgccacagtgcgcaaggatctgctccagcatcaacgggtggggcttgctggcggtttcatccgcagcgcgggtgatatcaaagtaatcttcccagccgtgggccttgagcacacggtccaggccgcgacgagccttgccggtggcgaccgccaggtgataccccagggcacgaaacgcttccagcgattgcaccacgccttcaaacagcggcgaaggcgtagcttccagcgcgatgtagtggtcggcgtagtgctcgcgaaacgctaccagctcggcgtcgctgatgtcggggtacagggtgcgaatggcttcaggcaagcccaggccgataatgcccttgactgccaggtccgtgcacaactcatagcccgagcgggtcgaggccatgtgcatggactcgacgatgcggccaatggaattggccagcgtcccgtcccaatcgaagatcagcagcttgtagtcaagatgcgacactcaaacgctccacggtcttggcccacatttcatcgaccggcgcctgcagtttcagctcgccgccatcgggcagcggcacggtgagcatgtaggcgtgcaggaaaagccgcttaccgcccagatcgcgaatttccttggagaaatcctcgtcgccgtacttggtgtcaccggcgatgcagtgacctgcatgcagggtgtgcacccgaatctggtgggtgcgcccggtcaccggcttggcctcgaccatggtggcaaagtccccgaagcggcgcagcaccttgaacagggtcagggcttctttgccctcctcatccacttcgaccatgcgctcgccggagcgcaggttgctcttttgcaacggcgcacgcacgctcttgatcgagctggcccagttgccgcgcaccagcgccatgtagcgtttgtccacgccatcgccacgcagggcggtgtgcagatggcgcaacatgctgcgcttcttggcgatcatcagcaggccagacgtgtcgcggtccaggcgatgaaccaactccagctccttgcaatcggggcgcaactgacgaaaggcttcgatcacgccgaagttcaagccactgccaccgtgaaccgcaatgccacagggcttgttgatcacgatcagcttgttgtcttcgaacacaatcgacgcttccaggcgctgcaacaggccttgggccagcggcaccggctcgtcgcgctcaggcacgcgcacgggcggcacacggacgatatcgcccgcctgcagcttgtattcaggcttgatgcgccccttgttcacgcgcacttcgcctttacgcaagatgcggtaaatcaaggtcttgggcacgcctttgagcctggccaggagaaaattgtcgatgcgttggccggcatattccggcgagacctcaagcagctggacgctgggggtcgggggggcggtagtcgtcatggcggcgatgataacaattttttatggaattgaagcacttaatcattactgctatagtcgcgaacgccgccaaaagcggcctggacagaggacatgcggcaaactgccggccctgaccatcgcaattcatcaggacgcgaggccgtcctacggggctttcgccacccaggaaggctcaagattgtaacaagcgcaggtgacatgaggcctgaagcgagtgcagaaagcagagtgaatactcgccttttgcgccgatatttacggccagttcacaaagtgcagtcagttttgagccagaccatggcgaatgcttcggaaacaacgcctgttaagagctgagtgagagcgcaaccgcccacacctagtcttgtttagccatgagcgtggactccccattggagtacacggtaaatgccaacccgctgcggattctgcgcgcggcagcacccgaattatcagggatacgtgtagggtggagatgcacaaccgtcggactgtgtagcactaggcttgttttagacgcttcatctcgtccacagtcgccggttgattcctcctcctgaccttagcttttgttgaagtggtgcctttgtcaccaccgctaacgagcaggacgcgtccgtcgcgataccggcccaattggccgattttgctggacactggagtggccaaccactcttgacgcacctgacaccgaccgtgagaagtcgtgtgtgccgaacgccgtttccggcagcccggaaaccgacggtacaacatgaaaagaatgctgattaacgcaactcaacccgaagagttgcgtgttgcactggtagatggccagcgcctctacgacctggacatcgaatccggtgcacgcgagcagaaaaaggccaacatctataaaggccgtatcactcgcatcgaaccaagccttgaggctgcctttgtcgatttcggctccgagcgccacggcttcctgcccctaaaagaaatctcccgcgaatacttcaagaaagcccccgaaggccgcgtgaacatcaaggacgtcctgagcgaaggccaggaagtcatcgtccaggtcgagaaagaagaacgtggcaacaagggcgcggccctgaccaccttcatcagcctcgccggtcgttacctcgtactgatgccgaacaacccacgtgccggcggtatttcccgtcgcatcgaaggcgaagagcgcaacgaactgcgtgaagcgctgaacggcctgatcgcaccggccgacatgggcctgatcgtgcgcactgccggccttggccgcagcagcgaagaaatgcagtgggacctcgactacctgctgcaactgtggaccgctatcaaagaagcgtccctggatcgttccgcgccgttcctgatctaccaggaaagcaacgtgatcatccgcgccatccgcgactacctgcgccaggacatcggcgaagtgctgatcgacagcgttgaagcccaggacgaagccctgaccttcattcgccaggtaatgccgcagtacgccagcaagatcaagctgtacgaagacagcgtgccactgttcaaccgtttccagatcgaaagccagatcgagaccgccttccagcgcgtggtcgaactgccttccggcggctccatcgtgatcgacccgaccgaagccctggtgtccatcgacatcaactcggcgcgtgcgaccaaaggcagcgacatcgaagaaaccgccctgcagaccaacctggaagcggctgaagaaatcgcccgccagctgcgcctgcgtgacatcggcggcctgatcgtgatcgacttcatcgacatgaccccggccaagaaccagcgcgccgtggaagaaaaagtccgcgaatgcctggaagctgaccgtgcccgtgtacaggtcggccgcatttcgcgcttcggcctgctggaaatgtcccgtcagcgcctgcgtccgtccctgggcgagagcagcggcatcgtctgcccgcgttgcaacggcaccggcatcattcgtgacgttgaatcgctgtccctggcgatcctgcgcctgatcgaagaagaagccctgaaagaccgtaccgccgaagttcgcgcacaagtgccgattccggttgcagccttcctgctcaacgaaaaacgcaactcgatcaccaagatcgaactgcgcacccgtgcccgtatcgtcatcctgccgaacgatcacctcgaaacgccgcactttgaagtccagcgcctgcgtgatgacagcccggaagcccacagcggccagtccagctatgaaatcgccgcagctgccgccgaagtcgaagaagtccagccagccgctgcgacccgcaccctggttcgccaggaagcggccgtgaagactgcgccggcccgcgccaacgcaccggtaccgaccgaagctgccgccccggttgccacgccggccgccctgcctgagccaagcctgttcaagggcctggtgaagtcgctggtcagcctgttcgccaccaaggaagagcctgctgccccggttgtggttgaaaaacctgccaccgagcgcccggcgcgcaatgaagaacgtcgcaacggtcgccagcagagccgtaaccgcaatggccgccgtgacgaagagcgcaagcctcgcgaagaacgtgccccgcgcgaagaccgcgcaccacgtgaagagcgtgcgcctcgcgaagcccgtgaagacaccccgaccgtagcccgtgaagaacgtgcaccgcgtgaagagcgcgccccacgtaccccacgtgctccacgtgaagaccgcaagccacgtggcgagcgtgaagaacgtgtgcgtgaactgcgcgagcctctggacgcggcacctgccgttgccgttgccgctgccgctgccgctgccgcagccgttaccgccgaagaacgcccggcccgccagccgcgtgaagagcgcgccccccgtgaagagcgccaaccgcgcccgccacgtgaagagcgtcaaccacgcgccgagcaagccgctgccgccagcgaagaagaagtactgaccggcgaagagcaactgcaggaagacggccaggacaacgccgaaggcgatcgtccacgccgccgctcccgtggccagcgtcgtcgcagcaaccgtcgtgagcgtcagcgtgatgccaacggcaacgtaatcgaaggttcggaagaaaccggcgagaacgcagaaactgccaacaacgagccaacaggcgccgaactggctgccggcttagccgttaccgctgccgttgccagctcggtcatcagcgcccccgctgaagcccaggcccacgagcaagccgaacgcgctaccgctgctgtcgaagacaccgttgccgtagaaacgccagccgccgaaaccccagcggtcgaagcgccggttgttgaagcgccagtggttgaagccacaacccctgtcgaagccccagtggttgcggaagtggaagttgccccggttcgcgatgcacagccagaaaccgaagcggttgccgttgaaccagctccatcggttgagcctcagccagtagtcgaagcggctgcagaagctccggtggtcgaagaagcagccccggccgtgcgtgaagttcgcgaagaacagaccgccttccagtggaccgccgaaccggctgccccggttgaagcgccagcacctgccccagtggtagaagaagcgccggcaccggttgccgaagtcgtcgccgagccagcccctgtggttgagccgacgccggtggcggagcctgcgcccgtggttgaagttgaagccccggtggttgccgaagtggccgcccctgtggttgaagctgcacctgccagcgcccttaccgaaaatggccgtgccccgaacgacccgcgtgaagtgcgtcgtcgccgcaaggaagccgaagcagctgccgcagcggctgcccaggcggtagagcacaaggccgtggaagaagagcctaaacccctcgtctgattccatccgccactaaaaagccccgcctgagcaatcaggcggggctttttttgcaaaagattcgaacacacggctgttcaagtgcgggaggggcttgccctaatgcctgtaggagcgagcttgctcgcgaaaaactcacaggcccggcgttcattcaggaagcacgctttatcattgacgtttctcgcgagcaagctcgctcctacaggtattagcgctcgacgctgaaactcaaccgttgcggcacgtccacatcccatagcaccccaggatcatccacctgtacgccccgcacctgtgcttgtgcaaacaaaggcttcgcgccacggtccccggtcaacgccatcaatgcaggcccgaatacacgaccaaaagccaccggatgcccatactgcccggcatgcacaggtactgtgatgttttccggatcggccagcacacgctcgatcgtcgcggatcgaataaacggcatatcacccaacaccactagccagccatccgccgaggcgctggccgcaacggcagcggcaatgctgtcgcccataccggccgattccaacagcaggaccttgcaaccgtgcgcgtcagctaaacgaatcacctcatggcgctccggtgaggtcaccacccagcgttcaacaagcgtcgcgggcaggttaaccagcacctgctcgatgaccggccggataacgccatccagccccacgcaagcagccagtaacttgtcttgatccgccccggcttcggcgcgaaagcgactgccctgccccgctgccaacacaatcgctgtaacggtcactgcgccgctaccgccaggggctttttctgcatcggtgccaccccgttcttgatcgcaacaatttccgccatcagcgacagcgcaatttccgccggcgtatggctgccgatgtgcaggccgatcggcccgtgcaaacgcgcgatggcctccgccgacaagcccagcgcagccaggttctcccgacgcttctgggtattgacccgcgaacccagggcgccgatatagaacgccgtggagttcagcgccgtcagcaacgccatgtcatccagacgtggatcgtgggtgaggcagacaatggccgtgcgttcatcggtatgaatattcaacaccgcctcgtcgggcatgcccggcacaaagcggccatgctggtcttcccagccgtagacgaactcttcgcgggggtcgcagatcagcacttcgaaatccagcagacgtgccatttccgctacgtaacgcgacagctgcccggcgccgatcaacagcaggcgccagcgcgggccatagatggcgcgcaagcgttcaccgtcgaagctcaccacgtcggtcttgctggcggcgctcaaggtcacctcgccggtggccaggttcagctcgcgagcgacaatctgatgatcttcacaacgcgccagcagcgcttcgacccaaccccactcctccacgcgctcctcggtgagccgcagggtgccgccgcagggcaggccaaaacgtgcggcctcatcgcgtgtgacgccgtaggtcaccaactgcacgggcgggccatcagcaggcaagcggccgtcctgcaggcgcgcgatcaagtcatcctcgatgcaaccgcccgacaccgagccaatcaccacaccatcaccgcgcagggccagcatcgcccccggcgggcgcggcgcgctgccccaggtttgcaccacgctgtacaacatcacgcgctgcccggcgcggcgccattgcagcacgctgcgcaggacgttcagatccacactgtccatcaggcctccggtaagtactgtcgcgctcactgtaaaccaaaaatatccgttgtatcccgccagaaacgcaaacgccccgaaccagtcggggcgtttgccgatagcgttggcgtcagttcacgccagcagccacttacttgacgacaggcgccgggccttcagccacgcccaggtcatcgagttcgcgggtttcggagataccggtaccgccagacgccagctcgctttgcagcttgtcggtgtccaattccttgacccacttggccacaacgatggtggcaactgcgttacccaccaggttggtcagcgcacgggcttcggacatgaagcggtcgatacccaggatcagcgccaggccggcaactggcaggtggccgacggccgacagggtggcagccaatacgatgaaacccgaaccggtcacgccagccgcgcctttggacgacagcagcaacaccagcagcagggtgatctggtgggtgatgtccatgtgggtgtcggtcgcctgagcgatgaacacggccgccatggtcaggtagatcgacgtaccgtcgaggttgaaggagtaaccggttggaatcaccaggccgaccacggatttcttcgcgcccaggcgttccatcttgatcagcatacgcggcagtgcggattccgaagaagaggtgcccagtacgatcagcagttcctcacggatgtagcggatcagcttcaacacgctgaaaccgtgagcgcggcagatagcgcccagcaccagcaccacgaacaggatgcaggtgatgtagaagcagatcatcaattggcccagttgcaccagcgaacctacaccgtaggcgccgatggtgaacgccatggcacccagggcaccgattggcgcgagcttcatgatcatgttgatgatgttgaacatcacgtgggcgaagcgatcgatgaagtccagcaccggcttgccataggcacccaggcggtgcagggcgaaaccgaagatcaccgagaacatcagcacttgcaggatgtcgccattggcgaacgcgccgacgatggtgttcgggatgacgttgaggataaagcccacgatgctctggtctttaccggcggtgacgtaggccgccactttggaagcatccagggtcgcgacgtcgatgtgcatgccggcgcccggctgcaccacgttgaccacgaccaggccaatcagcagagcgatagtggaaacgatttcgaagtagagcagcgcgtagccgccggtcttgcccaccgacttcatgctttgcatgccagcgatgccgctgaccacggtacagaagatgatcggggcgatgaccattttgatcagcttgataaagccgtcacccagtggcttgagggccacgccggtctgcgggtagaagtggccgagcaagataccgataacgattgcgacgatcacctggaaatacagggatttgtagattggctgacgagtcgtcattgcaaagttcctcaatcgtcccgtgtggcaaatatccgccattgcccacggcacttgaattgcgaaccctcctgcactggagggatttgttgtttgccaagcctgtaggaacaagcctgcgctgtaatccctatcgcaaacagcgtgccactttgcttaaacgcgctgaaggcctttagacatcagggcttgggttttacgggcgactccgaggcgtgcaacaaggtggcggatttccgcccactcaccctgtctcgtcctacaatttggcggatatccgccttgtcgccccgccgggtgatggctaccatccgccactccatggatgaggccctcgcatgcgtgaacgtaccatcgccagccattacgcccgagcggccctcggcggtgcgcgccgagtcggttttgactactcgggggtgttgcaccaggtgggcattaccccagaactgctgaccgagccgcgcgcccgcatcgctccagaacaatttacccgcttgttgcaaatgctctggctggggctggatgacgaatacctggggtttgccgaagggccgagcaaacgtggcacttttgccatgatgtgccacgcgctgattcattgccgcacgctggaaaaggcgctggagcgcggcttattgttttatagcctgttcccgcaaggcccgcgctggcagctgacgaaagaaggcgacatggcgcgcctgagcctggacgactcgcagctatgggacccggaccactttctcagtgaatgcctgctggtgatctggcatcggctgggcagttggttgatcggccagcgtatccggctgcagcaggccaccttcagttacccgatgccggcccatgccggtgaatacgacctgctgttcccctgcccccaggtgttcggtgcgccgaccagcagcctggtgtttcccagccgctacctgagcctgccgctgttgcaggatgaacgcaccctcaagcacttcttgcagcgctcccctgccgacttgttatccaggccggatgaaggcgacagcctgagcagccagctgcgccgcctgctgagccgcgaccgcacaccctggccagacctggaagccgtcgcccagcacttgcacatcagcccacagaccctgcgccggcatctgcgcgaagaaggcacgagttttcaggcattgaaggatgagttacgccgggatatcgccatttaccacttggggcgggcggatttgtctttgcaggagatcgccgaacaattggggttttccgaaccatcggcgtttcatcgggcgttcaagaagtggacggggttgacgccgggggcnnnnnnnnnnnnnnnnnnnnnnnnnnnnnnnnnnnnnnnngtgtacatatccattgctgcggtaacggccacctagggttccgctctgacagcggctcacttttgaaaagccggattgccggcccagtcaaaagtaagcaaaacgctcttgccccaccactcggcacctcgcttaggctcggtgtgcccgtaattcgtcagtgatttgggggccgccgccacgcgccatccatggcgcggggcggctaaaccggcatccctgccggtttaccccccaaatcactgtcgaattacggccagcgtggtttaacggggcgcttaaggtcaagatcacaaggcaggaaagtgaatcctgaacgccgccccacccaacgctgaatcccccaacgtcaaccgcgcgtgatagctttcaatgatgtccttgaccaccgccagccctatcccctgccccgggtgctggcggtcgagccgttcgccacgctgcagaatccgtgcacgctggtccggtggcacaccagggccgtcgtcttcgatacacagctcaatgccatcgaggttttccaccaggctgatacgcacttgcttgaggcacaggcggtaggcgttttccagcaggttgccgagcatttcaagcaacgcgcccttttcgataggcacctcgcaggcctgcggcagatcaaacgtcacggtgacccgcttgtcgcgataaaccttttccaatgtatcgcacaggctttgcaccaccggttccaggcgtacctggtgacgcaccaggccactttttcgcaggctggcacgctgcagttggtaaccgatctgctggctcatgcgttcgatctgcgattgcagcacccacgcctggctacgttcttcggggcgctgggccatgtcttcgctcacgccctgcaacaccgccagtggcgttttcaggctgtgggccaagtcatcgagtgagtcgcggtagcgcgcacgctgttcgcgctcgctgtgcagcaagcggttgagggagccggtcaggcgcagcagttcgcgggggtgttcttcgctgaggctttcacgagtgccgccttcgatctggtcgagttcatggctcaggcgccgcagggcttgcaggccccaggtcaggcccagccacaacagcgtcaacaacaccagcaaggccgcgccgaacccgaggtagaggttctcgcgcaggccttcgagggtcagttggtattcgcgtaccggctgcagggcgacaatgctgaacgccgcgctcttgcctcccagcagccggacctcgacgtcatacacgaagaattcctggccattggcctcgcgaatccgcgcaaactcgttgccgcgcccgtcgtagcgcggtttgtagttgatgttttcttcctgggtcgcccgcgagcgccataccagatggccttcacggtcgtagatatagcccaacagccgactgtcggtgaggttgaaacgctcatcgggcaactgcgccggcatcagcaggcggttattgtcgacccgcgccgcggaaatcagcgtggtcacatccgaggccaggcgctgttcgatggaatcctgcagcgccaggctgaatgcgccttgcatggccggcaacaagccgagcataaatagtacggccaaagtggcggccgccagcatcaggcgtacacgtagcgaacgaatcaacggcagcgctcattgaacaggtagcccaggccacgcacggtatcgatcggcttgaacccggccgggccttccagcttgcggcgcaggcggccgaccagcacttcgatcacgtttggatcgcgctcgtcgtcatccgggtacagttgctccatcaagcggtccttggcgaccacttgctgatgatgacgcatcaagtattcgaggatccgatactcgtaggcggtcagcgccaggggttgctcgtccagggaggcttgcttgcggttgaggtctagcagcagcggcccggcaacaatagtcgattgagtaaaaccgcttgatcggcgcagcaaggcgttcatgcgcgcctccagctcttcgaactggaacggcttgaccacgtagtcgtcggccccggccgccaggccttccaccttgtcctgccagttgccgcgggcggtgaggatcaggatcgggaaggtcttggtctgggtgcgcaactggcgaatcaggtccaggccgcccataccgggcaggccaaggtcgatgatcgccaagtcatggttgaattggccggtctggtacagggcttcttcggcattggccacggcttcgaccacatgcccgctgtcggtcaggcgggtaaacaggtgatgacgcagcagcgcctcatcttccaccaccagcaatttcataaggttctccactgcaattcaactagccgacagggggatatcatagcggccctgcagctcttgggggcgcagttttatgccattgtagtggccggtcaggtgcgcgtagccgctgcgatagtcgggttgcgcaggggtagcgcccagggcctggccccacggcgcggcctgggtgccggcgtcttcgaagctgacacgatggatcaggttgctggatttcttggttttctcgctgccaaaggccgcaaaggcgccatcggacgcctgcacgccagcagtggcgccaagcatggtcaaggccaacatcagctttttgatcgcagtcatggtggttacctcatacgcgtttgggctgtggggtccagactacgcaggcgcccctgaactccccctgaacaggctctgaaccgcagctgaaccgcaccgggctatccactggcccgccaactcggcaaaataccgcgcatgacgcccctacccgcttgctgcaccccactcgatgatcattggccgttgccggttcccttgccgggcacggtgtttttgagcacgcgattcgacccagctttattgagcccgggcgatttccagcgctgcgatgtgccgccgcccgcgagcatccagcgctcggtcgccaagcgccaggcggaatttctcgccggccgcctgtgcgcacgcgaagcgctgcaacgactcgatcatctgcactgcatcccggccatcggcgaagaccgcgccccggtctggccagggcatatcagtggttccatcacccacagcaccgggcacgctgcggcgattgtcgggcacaaggcgcaatggcgcgggctgggcatggacttggagcacctgctgtcaccggaaagggcggaccgtctggccggggagatcctgaccgccgatgagctgcagcgcatggccgccctgccccgtgagcaacaggccttgctggtgacgctgacgttttcggtgaaggagagcctgttcaaggcgctctatccgatcgtgcacaagcgcttttatttcgagcatgccgaggtgttggagtggtcagcggctgggagagtgcgtctgcggttgctgaccgatctttcgcaagagtggggccatggcaaagagctggaagggcagtttgtggtgcaaggggagcagttgttgagcctggtggctgtcgcaatgtaggagcgagcttgctcgcgaaaaactcacaggcgccgcgtttattcaggcagcacgcgttatcgttgaggtttttcgcgagcaagctcgctcctacagttgggtttcagggcttatcctgatccctgggccagctcaggctgaagcacgccccgcccaggttattgctcttgctgatcaacgcccgcccgccgtgccaatagataatccgccgcacgatcgacaaccccaggccatgcccgccagaggcgcgggtacggctatcatccaagcgcaggaacggcgtgaagatccgctcccaggcgctttccggcacgccggggccgtcgtcttccacatcgatgcgacaacgcacctgccctacctgataactgatcagcacctggcccttggcatggcgcatggcgttactcaccaggttttgcagggcgcggtgcaggtagcgcggctcggcatcgacccaggcgtcatcccaatgcgccgaggacaggcaaataccccgggtgacggtgacctgcgggcgcaatggcgataattcgccaatcacctggtcgagcaatgcattcaggtccacgcgctggaaattcagctccggcgcgccctgttccaagcgggcataagtgagcatctcgtccaccaggccatcgaggtcctggatatcgccatccatgccttccaggtatttgcgtcgcgcttgcggcgtggcggcgtcaccgatcatctccaggccaaagcgcaggcgcgcgaccggtgtgcgcagctcgtgagacaccgcgcgaaccaactcgcgctgaatcgccagcaattgctgcaagtgctcagccatgccattgaaagctgccgccaggcgcccgaccgagtcggcgccgcgagccggcacgcgcacttccaggttgcccttggcgatacgcgtggccgccgcctccagacctttgagccggcgctccagttgtcgcaccagcagatagacgatcaagccgatcagggtcaggccgatcaaggtgatcaggatcagccactgcgccgggtaagggttcatctggtacagcgggccgatctccagtacccacggggtgccgaccatcccggcaaacacgcgaatcgaatcgccgcccttgcccagcgccatcaccgtatcgccctccgccacgcgacgacgctggtcgtcgtccatgtcggcctggtcaagggccgtcaagtgcatttcaaaaccaaaacccttggcgtgcttgatgtcggccagacgctggggttgttcggccaccgggaaacgcaccagttcgtcggccagcaggtaaatagtcgcacgggccaattgctcgctgatctgctgcacctcgccggtaagcaccagttgctcttgctcgctgaccaaccgcagcacccgcgccgcgtgggggccggtctgttccaccaggacctggccgcgttgcaggcggttgcgctggcccaggtccaattgcgcgtcggtgaacgtgcgcagctccagcggaatgcccagcaaacgctcccacaccgccaaagcgcgctggcgttcaatggtgctcatgggttgcaggttatcgcccatcaacgcaaaggtgccgtgagccaggcgctcacggtactggccgctgcgcacgtcattgagcaggtgcagcgccagggcgccgagcagcgccaccaggatcagcgccgcgcacatgccgccgtagatgcgcaggaagatcgagttcacagcggcatatcggcagcggcttcggggacgaacaggtagcctttgctgcggatggtcttgatcaggcgtgggtggatcggatcgtcgccgatctttgggcgaatgcgcgagatacgcacgtcaatcgagcgatcctggccgtcataaccaatgccgcgcagggcgatgaagatttcttcgcgggacaggatgcgcccggcgttcgcaaccagcagccacaagaggtcgaattccgcgctggtcagttcgatgctgccctcatgcaaccaggcttcgcgcaaggcattgtccaccaccagcgggccaaactgcaggcggcgctggttttccactgcaacgggcaacaccggttcactgcggcgcagcagcgcctggatacgcgccagcaacaaacgcgggcgcacgggtttgcacacatagtcgtcggcgcccatgtccaggcccagcacctggtccatgtcatcggtgcgcgcggtgagcatcaggatcacaccgtcatagcgctcgcgcaccttgcggcagatgctcaggccgtcttcgccgggcagcatcaggtcgaggatcaccaggtccggctgctcggcgatgatgcgcgccacggccttggcaccatcgccttctaccgacacgcgcaggccgttgctttccaggtactcacgggtcaactcggcgagtcgctcgtcgtcctcgacgatcagtatctgccaggcttcttgctccatgcgctacctcgttgttattagaatttcttctggccgacacaatcgaatgtgaaatacggtcggtgtgggagctggcttgcctgcgatggcggtgggtcagcgagcctgtgggtggctgatacaccgccatcgcaggcaagccagctcccacctattgatcttcagcaggcatagcctgtttgtcatgttatgagggcataacaaaggccgattgtagccatgcaccgccccttgaacacaagccgggaaatccattcggtcatggcgattttttgtggtagggttcgcgccctcaaaattcccgccggcagtttctacccgggaatattcggtgacaaacggtgtaatccagtagtaatgcggcctacacgggtgttccatgattcatacacattttacccacagcgttatccacaggtagtgcgttgctaagccccccaaaacgcattatcttgtacctcggcgctaaaaaaaccctacatgtagggttttcagcgaaaagaccaaacacatatccggcaagaaactcaagcgctttcttgctcgtgtttggttgaaccaaagcattttttgaaagcccaaaccgcgcacgcggatggcaaccgttttccagcccgattggcagaaaacggtacgggtgttgcagggcttgaatggggccactgtcacccaccaggaatacggcgaagggctccccggccccgaaccaaagacttcggcatggaagcggcgcgatgagctcccttcctcctgtcccgaagttgttatgccaggcccaggcctgctgtaagtgcttcaggacggaacggtgggcaccgtgatggtgcccaaataaatatagaatgtggagacaccccctcatgcaaaccgacacaactcgcgagaacccgcaaggctccgtgccgcaggccgctgattcgaacctggatctgtccgccactgcacctggccaactgcgcgtgatcaagcgtaacggcactgtcgttccttataccgatgacaaaatcaccgtcgccatcaccaaagcgtttcttgcagttgaaggcggcaccgctgccgcttcgtcgcgcatccacgacaccgttgcccgtctgaccgaacaggtcaccgcgaccttcaagcgtcgcatgccatcgggcggcaccatccacatcgaagaaatccaggaccaggtcgaactggccctgatgcgtgccggcgaacagaaagtggcccgcgactacgtgatctaccgtgactcgcgcgccaaggagcgtgccgtacgttccccggccgaagaagccgccgttcaagcgcacccgtcgatccgcatcaccctggccgacggcagcttcgcaccgctggacctgggccgcctgaacaccatcatcaccgaggcctgcgaaggcctggaagaagtcgacggtgacctgatccagcgcgaaaccctgaagaacctgtacgacggcgtagccctgaccgacgtcaacaccgccctggtgatgaccgcccgcaccctggtcgagcgtgagccgaactactcgttcgtgaccgcccgcctgctgatggacaccctgcgtgccgaaggcctgggcttcctgaaagtcgccgacagcgccactcaccacgagatggccgacctgtacgccaaggccctgccggcctacatcgccaaaggtatcgaattcgaattgctgaacccgatcctggccaccttcgacctggaaaagctcggcaaggcgatcaaccacgaacgtgaccagcagttcacctacctgggcttgcaaaccctgtacgaccgttacttcatccacaaggacggtatccgcttcgaactgccgcaagtgttcttcatgcgcgtggccatgggcctggcgatcgaagagaagaacaaagaagaccgcgctatcgagttttacaacctgctgtcgtccttcgactacatgtcgtcgaccccgaccctgttcaacgccggtaccctgcgtccacagctgtcgagctgctacctgaccaccgtgccggatgacctgtcgggcatctaccacgcgatccacgacaacgccatgctgtccaaattcgccggcggcctgggtaacgactggacaccggtgcgcgcactgggttcgtacatcaagggcaccaacggcaagtcccagggcgtcgtaccgttcctgaaagtggtgaacgacaccgccgttgccgtgaaccagggtggcaagcgcaaaggcgctgtgtgtgcctacctggaaacctggcacatggacattgaagagttcatcgagctgcgcaagaacaccggtgatgaccgtcgtcgtacccacgacatgaacaccgccaactggatcccggacctgttcatgaagcgcgtcttcgatgacggcaagtggaccctgttctcgccatccgaagtaccggacctgcacgacctgaccggcaaggccttcgaagagcgctacgagtactacgaagccctcaccgagtacccaggcaaggtcaagctgttcaagaccatccaggccaaagacctgtggcgcaaaatgctgtccatgctgttcgaaaccggccacccatggttgaccttcaaggacccatgcaacctgcgcagcccgcagcagcacgtgggcgtggtccacagctcgaacctgtgcaccgagatcaccttgaacaccaacaaggacgagatcgccgtttgcaacctgggctcgatcaacctgccgaaccacatcgtcaacggcaagctggacaccgtaaagcttgcacgcaccgtcaacaccgccgtacgcatgctcgataacgtcatcgacatcaactactactcggtgccacaggcgcagaactccaacttcaagcaccgcccggttggcctggggatcatgggcttccaggacgctttgtacctgcagcacattccttacggctccgatgcagccgtcgagttcgccgacaagtccatggaagcggtcagctactacgcgatccaggcttcctgcgacctggccgacgagcgtggcgcctacgagacgttccagggttcgctgtggtccaagggcatcctgccgctggattcgcaacagatcctgatcgaagcccgtggccagaagtacatcgacgttgacctgaacgaaaccctggactgggcgccggtacgtgcccgtgtgcagaaaggtattcgtaactccaacatcatggccatcgcgccgaccgccaccatcgccaacatcactggcgtgtcgcagtcgatcgaaccgacctaccagaacctgtatgtgaaatcgaacctgtctggcgaattcaccgtgatcaacccatacctggttcgcgacctcaaagcccgcggcctgtgggactcggtcatgatcaacgacctgaagtactacgacggttccgtgcagcagatcgaacgcatcccgcaagaactcaaagagctctacgcgaccgcgttcgaagtggacaccaagtggatcgttgacgccgccagccgtcgtcagaaatggatcgaccaggcccagtccctgaacctgtacatcgccggcgcctcgggcaagaagctggacgtgacctaccgcatggcgtggtaccgtggcctgaaaaccacttactacctccgtgccctggccgcgaccagcaccgagaagtcgaccatcaacaccggtaagctgaacgctgtttccagcggtaaccacggtgatgactcggtactcgcagcgccagccggcccggcacctgtgccaaaggcctgcgcgattgacgagcccgattgcgaagcttgccaataagctgagccagtccagggggattgcccctctggtttgaaaaagcccgatagaccccgactgcatagggtttatcgggctttttgcttatcgccttagagaaacgcgtacgcaataccttgcttgggcgcgccacctctgcgcccccacaactccacccgcccgtcgatgaccgccatcgaatggcgatcgtaggccacgacaccgagcttgccgctcgccagctcactgcttgaagactgcctgtatagccctttcaaccccaggcgatccaatgcttcgtggggcatttcgccgttgttcaaactttgcatcgcgtgggcgaagcttcttttggattgactagggttgtcgtccaggccattaccttcaatctgtgcccgcttggcgctcgctgcgaacatgaagttggcatccgtcatcatccccggattgtcccccttgaactgcgcatacctggccgcctgctttaattcatccttggatagattaagttcgaagccgtcgcgcatcttcacgtgataaccgtctgccgtctcttttacctccttgaaaacgtcggtgggtttctggccgaacttcatcattgcgccctttatcgctgacaccgtgacgcagttgccatcgggcccctggctgaatccactccagatgttgtccggctttttccctgggttactttgatcaggcttgtagttaaagtgcttggaaccttcggtaatcggcagattactcatgggctcgctgggcccgaaattaccggggcttggcctgcccccaccgcccccaccaccgccaccacctggcgacgggcgaggagaaggcggcgaaggtgtgggtgatgtatcgtcgatttccggaaaccattgcttcatcagacggcgcagcatctccagccaggagacgtccgccttcgccatcaactcctgcatgatctccttgaatttctcatcacccagctcttcgcgcttctcgttcaacttgtcacgaaggtcttggacggtttggctcttggatgttttctcggcatctctcaactcattgagcagttgcctcaccgattcagcatcagaggacttgcctcccccgggttcatccgactgacttttgcgtctgtatagaccggcgctgtagttattcagaacaaaccaatggctgcctgctggcaccccttcccactgcttgtacatcgccatacctctctcccgctgatcgatgggcgacaggcgcccgtgccccgtacgtggcgcaatgggcgctgggcgttccagcagtaaggcgaggtgaaacaagcggtaaactagtaacgcgcgcgcacaaaaaagcccctcgatcgaggggcctttttgtgtgcgggtattagcgcggtggcatcaggtcatctgaatgatggtctgcatgatggtgctttgggtggagatggtcttggcgttcgcctggtagttgctctgggccttgatcaggtccaccagctcgctggtcaggttgacgttggagttctccagggagttggccacgatcgaacccagggtaccggcttgcgggttgtcataacccggctggcccgaggcgaaggtctctttccaggtggtcgcaccggctggctgcaggccctgctcgttgttgaagctggccagggagatctggccgatggccttgctctgctggttgctgaaagtggcgaacaggaccccgctgccgtcgattttcaggccggtgatctggccggtggcatagccatcggtgaccggagggttacggtaggtggccgagttgtactgggtaatgttggccatgttgatggcgataccacccgggttggcatccgcaccgttagccttccatacgccgtcagttacctttccgggaacccaaccggcaacggtgagggtcttgtcggacacaccattggtgacgacggtagtcagattgccagcgccgtcaaaggtcaatgtcgacggcacaggtggcgtcgaaggggtgccggtcggagccgaaccatcggggttgcgaccgtcaatcagggtataggcattccacttgttgccgtcggttttcaccaggtactgcaccatcgggtgcgcgttaccttgggagtcgtacaaggtggtgctgtactgggtagtgaaggtttcggtcttggttggatcaaacggcttggccgtctggtcgatcaccggctccgaggagttcaggttgctggtggagtcgaccttggtggacgccttgggcggcaggttcgccagattcagttgcaggtcgaccaagccacccttgctgatcttgccattatcgtccgcggcatacccttgcaggcgggaagtgccggtgttgttggtgatgtagccgtccttgtccgcacggaaagcgccgctacgggtgtactccagcgaaccgtcgctgcccttctgtacgaagaagccaccgccctggatcgccatgtcgaggatgccgccgctgccgttgacgtcgccctgggtgaactgctgggacaccgccgccaggttcacaccattgccgatgctgttctggccagtgcccagcttggaagccgcgtagatatcggcgaattccgcacgggatgacttgaagccagtggtcgcgacgttggcgatgttgttgccggtcacgtccagttgtttgttggccgcatagaggccgctaaggccgatattaaaagacatgtttctctccctctgccgtatttagccggctctatgtaccgatagtctgaatttgcgacagcttgacgctgcccatgccgcctgcaaggttgagcagcatttcgccgccggtcttgctcagggtcacgctggtgaccgtggcgggcagcgaagtggtcaaggccactgcgtcgcctttgtcgttcttggtggtggcattgaaggtgtaggtgccagctggggcaacctcgcccttgtcgttcttgccatcccagataaagctctgggtaccggcactctgggcgcccatgtcaacggtgcgcaccacattgccgtctttgtcggtgatcttgacggagacattgcccaccgccgaggttactgccaccgaaccggtcatgctcttgctggtatccaccatggccttgtcggtctggatgatgatcgagcgccccaccagcgacgaagcctgcagcgcctgcgacgagctgaagttgctggagatgttgttcaccgagtcgttcagggtattgatgccttccaggctgctgaactgtgcaagctgcgcgacgaacgcgccgttgtcctggggcgacagcgggttctggtttttcagctgggtgacgagcagttgcaggaacgcatccttgcccagcgactggttgcccgtcgccgtcttggaagcgtcgctgacgctgctgttgttcgtcgcagtcttgaccttggaattgaaaaggtcctgaaccgccgtgttgtttgacgtatcaacgatggccattatttggcgccccttatcactgacccagggtcagaaccttctgcatcatggttttggcggtgttcatcatttccgcgttggtctggaacgagcgactggcagagatcatgtcagccatttcctcgaccacgttgacgttggggtagtagacgtagcccttttcgttcgcggccgggtggttgggctcgtaacgggcctccaggttgctctggtcttcaaccacgcccaacacctgcacaccggagccggcggcgtcctggctctggaacaacgaatcgctgccgcttgcctgccccccctggaacatggtggcgaacaccgggtggcgggcgcgataggtctggtcaatgctcgaggagacggtttcggcgttggcgatgttactggcgacggtgttcaaacgcgtggtctgcgcgctcatgccactgccggcaatattgaaaacactggacagggacatggcttactctccgcgcagggctgacatcagccctttgaatttgctgttgagcagggtgaagctggcctggaagttcaccgagttttcggcgtagttcgattgctccagctgggcgtcgacggtgttctggtcgatcgacggctgcatcggtgtgcgatacagcagcgactcgtcacccttgctcaggccttgcgcttcaatatgacggctgttggtcatattcaaggcgaaggtgccgttcttggtcttgtcctgttgtgcggcgagcacagcggagaagtccaagtcccgagccttgtagttcggggtgtcggcgttggcaatgttgttggccaggacttcggcacgctgggcgcggaagcccagggcttgttcgtggataccgagcgctttatcgaagctgatgctcatggcggaaacctttaggctgacctgctgttcgttagcagggttatagcaaggtgcatgccaatcttgcgggagcccgtatatcaagggcttcgagggaagttgccggcgactatgccagaaaagcggcaagcgatttccgcgtagtgccagtaaagcggcaatggggcttgccgctttactccagcttgccgagaaaaaaatgtgggagctggcttgcctgcgatggcgcagtacctgccgacctattcatcgactgacacaccgccatcgcgggcaagcccggctcccacagtttttattgcatacatccagactacttggcctggtagatgatcccagggctgcattgcaccatctggaagtgatccggcagcccattgagcgcctcggaagcaccgaggaacagataacctccgcgcttgagggtgccgtggatgcgcaacaggatgtctttcttcacttcagccgagaaatagatcagcacgttgcggcagaacaccatgtcgaacttgcccaggctggcgtagctgtcgagcaggttgaacgagcgaaattcgacgcggttcttgatcggcgccttgatcgcccaacgccctgcccctttgggatcgaagtagcgttgcaggcgctcctgggacaagcctcggcccagggccaggctgtcgtactcaccggtcttgcagttggtgagcatggtgccggacaagtccgtggccacaatttgcgcgccggctttcaactggcccatgttggttcgctcgaactcgtcgatggacatcgagatcgagtacggctcctgccccgaagaacaggccgccgaccagatacgcaggcgctggcccgggctggccttgatggcttcgggcaacactttgttcttgagcacttcaaagggataggtatcgcgaaaccataaggtttcgttggtggtcatggcatcgaccaccatttccttgagcccactgcgcggctgaccctggatccgctggaccaactcacccagggatttgatgccctgctgttccatcagcttgttgaggcggctggataccaggtactgcttgttttcaccgagcaatatgccacaggctttttccaggaagacccggaactgttcgaaatccaaattacccgtagacaatgatgccgcctcttaaatcgtgtgaccgccgggggacatcccctagccgtgatctgctgccttgatccggtcgactacccgggatgcgaggtcatcaggacggaatttggccagaaagtcatccgcaccgaccttcttgaccattgcctgattgaatacccccgacaacgaagtatgcaggatgatatgcaatttttgcatgcgtggatcgttacgtatctcggccgtgagcgtgtagccatccatttccggcatctcgatgtcagagatcatcatcaagaattcttcttcgggcttcttgccctcgtccgccagcttgcgcaggtaatccagggcttggcgcccgtcattgagggccaccacctccaccccgacggtttgcaggcaacgtgtgacttgcttgcgcgctacggaagagtcgtccacggtcaacacgcgcagcgaaaccgccttgtgtgccgtttcggcatccaccacaccgacggagatggtttccgaggtgggggccacttcggcgaggatcttctccacgtcgatgatttccaccaactggttgtcgacccgcgtcaccgccgtcaggtagtgatcgcgccccgtgcccttgggcggcggatggatctcttcccagttcatattgacgatgcgctccaccgagcgcaccaggaaaccctgggtcttggtgttgtattcggtgatgatcacgaaagggttctggcggtcttgcaaacccgcggcccccgtggccattgccaggtcaagaatcgggatggtcgcgccacgaatgttggccacgccacacactaccggactggacttgggcatgatcgtcaatttgggacattgcagcacttcacgcactttaaacacgttgatgccatacaactgattgccatccaggcggaaaagcaacaactccaggcgattctgccctaccagctgtgtgcgctggtttactgaatccattacacctgccatgcccagactcctaaatcctaggggtacgacgcgtacccaacactaaacggcacgagctttgctatttactgagtatggatattaaaacgacagtttcccgacaccctggccgctcacgctaccgcagactgctctgcgccgcgctggcgctgcttgtctcgggcctgggcgtcacggcccgcgccgacaacgttaccctgcctgatctacttatcggcgtcacccaaggctttcttgagttcactgtagaagattatctggcgaccacccagacgccggggcgttatgaaatccaggtcaaccagttggacccccgtttgcgcatgccactgtgcgacaaggaattgacagccaccctggaaagccccgcccagcccatcggccgtgtgaccgtaaaggtgcgctgtgagggcgcctcgccctggacggtttttgtacccgctcaggtcaagctgtttcgcgacgtggtggtcgtggcgagaccgttgaagcgcaccggcatcatcggctacgacgatgtggcgttgcgcgagcgggacatcagcctgatcaaccaaggctacctgacgtcgctggaccaggccgtcgggcagaaactcacgcgaccggtggtcaccgaccaagtcctcacgctggttcatctggaacaggccgaggtgattcgcaagggtgaccaggtggtgatttccgccagcagtggcggcctgaacgtcaggatgccgggagaggcgttgtccaatggcggcatgagcgaacagatccgtgtcaagaacctcaactccaatcgcgtgatcaaggcgcgagtcaccgcgccaggtcaggtcgaggtggcgctatagatgactggaatcaaatgccagcttttcctacactgtgtgctggatattgagccgaacaggtttattgtcaatcgagcctaaagtttgcccgggtatggccgaaaacatggcaagcgtccaaatacccagaggtttttcaacatggtcattgatttcagtcgtttgaataacgccccggccttgcccggcaatacgcgcaccggcggtgccaaggacagcgtagaagccaagccgcagcccttgcctgccaaagcagagcaggccgccgccagccagagtggggaatcggtacacctgagcaatgaggctcaacagttgcaaaaggtcactgactcgctgcgcgatcaacccgtcgtcaataaagcccgcgtggccgagttgaaacaggcgatcgccgatggcagctataaagtcgacagcaaccgtgtagccagcaagctgctcaacttcgaagccgagcgctaggcaaaggcctgcgcagggcttttggacgcttaaaacccaaggccagccatgcaccacgacgaacatttgctccaactgatcattgatgatctggcgccgacgcaacaattgctcgagctgcttaaggaagaatccctggcgttgtacggccgggatatgcgcttgctggaagaaatcctggcgcgcaaacaatcgctgattgtcttgcttgaacagcatggcaaaaagcgcagtgagattctgatcagcctgggtctgcctgccgatcatgatggcctggcacaactggccagccactcttcagttggcgatcaactgctggcacaaagcaaagaactcaatcatttgcttgcccagtgccaggaagccaacctgctcaacggtcagtcgatccagcttcagcaagccacgaccgccaatcagctgcgcatactgcacggcggagagcctccggccctttacaacgcccaaggctccacctcacgcctggtcaagccaagcacccgcagccaagcctgacgccggtttacagcgtggcctatccaaggcgcgctacatactggcaaaatgccggttcttgcgtgtagtcgtattttgcctggagatggaagaaccgtgttcaacgcccttaatgcggaagatgcaccgcagccacccaaggtgctcaccacgcctctggaaatcgccagcacgttgcggatgctgcaagaaagccatgacccactgatcatcactttccacgaacgcagccagcgcttccagagctacctggtggacatcgaccgggacagcaagacgctggtactggacgaaatgattccccgtgacggtgaacgctatcttgagaatggcgaagccttccgtatcgaaggtttccatgagggtgtgcgggttgcctgggaaagcaatggcacgttggccatcagcgaaaaaggcggccaccgcatctacagcggcagcctgcccggcgaagtggtttaccaccaacgacgcaatgccttccgcgccgctcttaagctcgcgcaattggtggacattcagttgggtggcgagaagctcaaggcgcctatcagcggtaagctgctggatatctcggcaaccggctgcaaattgcgctttgaaggcgatatctccgagcgtctgcagttgggccaggtctatgaccgctttatcgctgccctgcccttcggcagcatgaccacctctgtggaactgcgctacctgcacttcgaagacaagatcaacaccacctttgccggcgtgcgctttcacaacatgagtggtttggtgcagcgccaagtggagcgctttgtctaccaattacaacgtgaagctcggcgcttcgataaagacgacgatctttgagcgttagacgctgagataaaaaaacgggcagatcctgatgggatctgcccgttttttcgttcaggggcgtgccctgcttaagtcatggggatgctcgtccgggtctggtggctcgtgcgactcttcgctcgtcggctcctcggtttcaggggcgggctctggatcaggcacagtcacttgcatctgctcctgtaccacctgctcatccacccgcgggtcaagggcagccaccaagggcgaactggacatgctgtcgggcattgccacgtgatgcagcggtgcgtcgtcgacctgatgcaggttggtcacagccttgggtcgaatgcgccacaccaggatcaacgcacataagctgaaaaacgcatagagcatctggctgccgaatagcttcatcaccacacctgccaacagcggccccaagctggcgccgatcccgtaggtcaccagcaacatggccgtcagtgacacccgacgatcgccttccacatggtcgttggaaaaggccacagccaaagggtaaagacagaactgcaccagcgaacagaagaagcctgccacgaacagtacttccaacggtacctgcgtcatgattgccaacggcaaggccgtcaccgccaggcacaaggcaaagcagcgaatcagcagcgcacgatcatagcggtccgacaaccagcccagcggccactgcacgaccaatccagcaaaaatgcagctacccatgaacaggccgacttgctcagttgtcaggccctgctgagaggcgtagagcggtgccaagccgtagaacgaaccgacgatcaacccagcacccaacacggtgctgagcgactgcggcacgcgcttgataaaaaagcgcggctccatcggggccgggtgcagtggagccgggtgaatgcgccgggtcatggccaccgggaccaggcacagcgcgaagcacagcgccacgagcattaacagctcaagccccagatggggatgcatgaccaggatcaactggcccagtaccagcccaaggtaggacgcaatcatgtagccgctgaacactacgccacgctgcttggcatccgcctgctcattgagccaactctcgataaccatgtactggcacatcatccccaagcccacgatcatccgcagcacaatccaggctggcagccaatcaaccaaaccgtgacccagcactgctgcgccgacgatccccgcgcaggtggcgtaagcacgaatatgcccgacccgggcaatcaggcggtgcccgagcttgccgcccagcaccaagccaaaatagttggcagccatcagcgcaccgacccacaagctgtcgacattgtctgctgccagacgcaaagccagataagtactaagcaggccggagccgatcagcatcatcaaggaggcgaaataaagggctcgaaaagatttccagatctggcgcatcggcgttccgagcggctccttgcggtaaggggtagggctatcagcatgatagtccggggcagttgaatccggacaggcggcagagcctgtttacggggattattttgtttcacagctcagacgccacatgggtgtctgtgaggtacataaccgtggagataaatacacggcgcaccacctgtgaaccttgatcacacgcaaggttcgactcgtattagggtatctgcacaaaagatttcgatagaacactgtgcaagcttcgcaggcgtccgactttcaagcgcccaaaacaaaaccccaactgctttcgcaattggggttttggaatttaatcttgacgatgacctactctcacatggggaaaccccacactaccatnnnnnnnnnnnnnnnnnnnnnnnnnnnnnnnnnnnnnnnncaacttcaaccacttgcgcttgcgatctctcgtaagcgggaggcgaattctacagggatcgccatgaacgtcaacccctttatcttaaaaaaagcgaaacacttactcgcctataaaaaccagggtacccaccgcctctctatatagaaggagcgcacaacctagggacgcgaattatccccacccacgccaatgcatctggatcacaaccgaaagaagcgcggcgggatcccgcacaagcgaggaacaaggatgactgttgttgagaccgacaaatacgaggaggggatagctttacagagatggtgtcccagggccggttcgaacggccaaccttccccttaggagggtcatattaagcccaatcaccattgaggaagcccagcatttattggctttagcgtccggttgtgtccgtaaaaacgaccccgtatagttctttttgcacccaccatgcacccatgggaacaaattgaaagagaagctaacagccaaactgctaggatcactgcaggtcactggcaacgaatacgaagttcacgataccaccgtcggcggtctattcgtgcgtgttactgccgcaggtacaaagtcttacgtggtctcctgggcccgtggccgaaagaagactttaggtcgtgtcggcattctcacgcttgatcaagcgcgcactgaggccactcagtacctcgcagaagcccgagcacatggagagcctctggcggtcactcaaggccgaagaggcgccaccctgccctccttgcgcgacttcattgaagacacttatatgccgtggttcaaggctcaccacaaaggccacgagaagacacagcacactctaagcaataactatgacccaatcatgtcccagcgcctggacgcgatcaccgggcgagacctggagcagatccgcaccggatggatgcaggccggtaacaaggcctcgacggtgaatcgaaaaatgggctcgatcagtggtgttttcagtcgtgccgttgagtgggagtacatcgacacacacccgctggccaagctgaaacagctgaaagtcgattcaaagggggtgattcgctacctggctgccgacgagaccaagcgtctacgcgatgccctggacgctcgacaggatgaaatgagggacgagcgcgagagtgcaaacgcctggcggacggaccgccacagagagccgatgccaagcctcctgggactgcccttcaccgatcatctgaagccaatggtgttggtatcgctgaataccggcatgaggcgcggagagttgttcgacctgaaatggacagcggtgaacttcgacacgaagacaatcacagtcgccggggccaccaccaagacaagcgatacgcgccacatcccgatgaacaaggagtccattggtgtgctggaagcctggaagaagcaggtgagcaagtcgccctatgtattcccaggtcagggcggcggtcgctttgaggacgtcaaaagcgcctggctcaaattgcttgagcgggcgcagatcgacggattccgctggcacgatatgcgtcacgacttcgcttcacgcctggtaatggccggcgtaccgctcaatacggtacgggatctgctggggcacgccgatataaaaatgacgctgcgctacgcgcacttggcgccagggaccaaggccgccgcggtagagctgatttagagaggcggctcaaagggcacgatggtgcggctttctttgttttcctcaacgtgagccagcaaatcaggccaccaaattcggacgctatgcttgtcaatgtatccaacccccggaacatcccaaaactgagcgttttctgcgatgccatcggttagaaagactttagacgctttaatcgtttcccaaatccgctgctcctcgtaagtaatcagagaaggaaggtgggtgcataggtggataaagcgctcactttcatctgtcgaccatatttcgctcactgcgctcagcagagacataggccacggctcgcccgccgatacgaccggggcgtctaaatcaaaagcgatttcctcgatcgcagcttctaccacgccggtgatggactgtcgtcgaatgcgagagatgagctcgatcatcagcttaaccttggggtcgagacgtaaagtcaaggtctctgtcttccgtgcgccctggttgggcttgttcttagccatctcatctgcactcatcaattaacgcataaatcgaatcgtaccttttgcgtccgccgaagtccatgcgttcacaatcctcccatgattgcagttgactacatgcaaatacggcaataggattccctcattgcccaatcactctcgatgggcatttggagaatcctatggaacaagcaccccaacaaatggcgccgctgtcgttgagcgtcgaggaatcagcccgaatcttgggcatctctcgctccgccacatacgagcttatcgctcaaggcgaaatcaagactttcaagatcggccgccggcgcctggctttggcatccgagctgaaggcgttcgtcgagcgcgcagcaaaggtcggcgcacggtgaagtgcgaaaagaataaggagtggggattgcgcaggactgcgcgggagattgccaaggcggtgctagaacaccgccttagcgaaaacacactggatagcaccaacgtgaagggcaaactatgacacgccattcttcaactgagcaagaccgcaagatgatggaggccctgcgaaacgggccggtatcgaccatcgaggccgcaaagggcttggatatcgtccagccccccaacaccatccgccgcctcaggaaaaagggtcacgaaatccgcacctactggacgcatcagtccactgaaccaggacgaccgccacaccgcgtggccaagtacatcctgatgcgcgaagcgtcgtaatccggagaccgcaggggacgccgcgaaattgcggcgtcccctgcgcctgcctgcgagctgctggcgggcttcagcccgttgtttatccagccgaactacgctgaggtcgattcagtggaatgcctagccacaaaactacttagccgcggcgacacggtgagcattgagcgtgggcagctcgtcattcaaccggcgagcggcaagcccgtgccgcctgagtggatcaacaccaaccgggccaggctttgccgtgaagcgcttatttcattaggcctggatgctttcgagtacacggattattcaactggtcactatggaaaaacccggagtgccggtatcacgttgcggttcgtctcgctagtaaatggggagtctgtatacgccgttttcaatgcagacctgacccgtcagcggaacacagccgcagctaaggctggcacgctgcttcccaggggacaattccgtataggtaagcgcagccacttctacaaattctggatgggcacgggcttgtcattccctcggcgcctttcagctatgcacgattacatggggaaactgcgtggcgtcatgctgaccggattgctgactgacgaccgtattaacgccggcagtttggcgcctatcagcctgactgccgagcaattcagaaaggcaattttgccggacaaattccggacaatatccggacaacttccggacaacttccggacaagagccccggacaaggaaagcgctccagcccatgcggtgcgcgggttacagccaatttcaactacgtgcgtttcaaaccacgaaaacaagttaataagaaaggacgaatacaagacagcttccataactgatttacctatccctaagcctcctcaggatcagagtgttgacgagtggttggaggcatacagctccacatgatctaccttgccgaaaaggcccccgccgccagcaaatgaaaaaagggcaccaccctgattcggggtaatgcccttgatgcggcaaaggtttcgttgcttgtcagccctactccagcaccaccgcgcggtattgctgatcaccgcccaggtcatccgagccgaacagggcttgattgacggctttcctggtctcaagcagaaggtcgtgctcatcatgagtgccaatgtccgccgcaacccactcagggagctcctgacgccgccgcatctcgctcaggtgagtccaccaccgagtagcgtggcgccgctctgcgagaatgagctcaaccactaaggttcgttgcttctcggtgaagagtggcaggtgtaagacgctagagtcttccgcctcattgcgtgccgagccctccccttcaaattcggacttatcttggcctttcagagcgttactgatattttggtaaagttgcatgacgtgtctctcaaggttgcgtcgtgtgatcgccaggccgctgttcgcgcagcggcttggcacctcttttaagatggcccaaatctggaccttcgattcaatcggctacggtttaagccgatctacatatgggattttcccgtatctactgcttgcccttctcgcttatccagcccaccgcccaactcaaagggtctttcgactccataggcttgagtggcttcccgtcgcgtgctgcctgcttaccctcctgctccgtctcggtgtgaatccacaccgtggtgtgcttgtatccttcagcgatcctgcgcgctttgagatccctctgccgctcattgctgctcttaggtgtcgtcttgcggtcttcggtcatctggcacctcgtttgtactaacgtagatagcatattcgcacagagttagtactgacgcaacgaagtttaaaaatatgctacgcccaccttcaggatcgctgttttctgccgacaaaggctggaacccacaaaaggacttgaaaatgactaaaattttcttcaaaaaattgctggctgttattgctatgctcgctgcattgacctctggcgtttcctggcttatgtcagctgatcttcaactcaaatctctcacagcattggcatctgtgtcggcagagagcctggcaaagttgatcgtggcctctgctgagttgaatcagatcgctgccgtggctgcactggttgggggagtgtgcgttgctttagctctcatgtttgaagattgaatccaatccgcttaacgggagtctggtgaaaaatcgacggttctggccttcgtactttcgaaaacccggtagtttcgcgagagggtcgtaaaaggggtctcgtttctggaagcgacacccctttgccagcagttacagctgcatctgcctgatcacctggcgcggatcggcgccggcggatattgctgagatggcgtctttggtcagttggtccaggacctgctgttcgaacgcctcggccatggatgcagccttgcgcacgatcagcagcgccagttcgggcgggaatgtggtcttggatgggtcgggcaggtaatcgcaatcgatgactgacataggggctcctgagatgtcctgacttctcagggtatctcgacgcaactccaggtgaaaactctgaataaactcgaaaaggcagtgaattatctcgttgtgtgacgatttggtctcactgagacggtttggtctatctggcagattggtagtggatccgattttctcagtacgccttccgagcgctgcgaaacagaccatatgagccgaatcggaccgtatggccgggaaacagtcagccactagcacttgcttcaaaactgaggtatcacggataaccggcactgggctggatcaagggatgagaaaggtatgccgattttcgttagttattcgcacgcggacaaagataaaattgatttaattgctggacacctcgtccgaaaaagaacgagcgtatggattgaccgatgggagttgcgagcaggcgattcaataatcaataaggttcaggaggcagttgagggctctagcgctttacttattatgctatccaaagcttcggtcgaatccgaatggtgtaaaaaagagctcactgcgggattatttcgagagcttgacgaaaagcgagtagtcacgatcccagtgttgttagatgactgcaagataccgatgttcttgcgagacaaaatgtatgctgattttcggactgatttcgatgccggtatgtttactttgctggagtcagtagctcaattttccaaccctgagcagagcagacttgaggacgcagagggatacgtggactggtcttgtgactatggacttttcgacgggagctacttcgtcaattacatattgatgcaaagctctgaaaagcttcagatgtccttcgtgacagagattcaatgcatctacaacgatgttgccacacaccgccagatgcgttacgtggatgcaggtgtaggctggatggggcgaaccaccaacgcaatcatgctgctggactgtgcggagagagctaaggatgaaatgtttcttattctagacagcccgattccgcagcaaaaaaacatcacattctccgatccaaagaccggcgcccaaacagacatactagttaaatcaagaaagatgggcaacgacaatggaaaagaccaattaataaacataactgactacttcaggcgaatacttggatacgtaactgaaaccgagcggaagcccaccaaagaagagctagatgtatttaacgcaattaaaaatacaccttggtaatatccatcaataaacctgctccgttctcatgcagatccacggagcaggtttaatcagtggacgcccactgctagagctcccgcatagagccattagaactccgagtaatggttgctgaaaactaggcattgtctcgtttggttttatgggcaaccattggtctattcttgacagaccctagacagattccagcccatggccgcgctcaacaacgaaatcaaagcctttatcgtccaatccctggcgtgcttcgactctccctcacaggtcgcgaccgctgttaaggatggcttcggcgtggtcgtgtcgcgccagcaggtcgagacccacgacccgacacgcaggagcagcaaaggcctggcaaagcgctgggtgacgctgttcgaagacaccaggagcggtttccggtctgaggtggtcaaggagccgatcgccaaccgatccatgaggctgcgcgcgcttggacggatgcttgaagaggccgaggcacgcgggcacctggtgatggcgatgaaactgatggagcaggccgccaaagagtgtggtgacatctacaccagtcgcagggccaggactgacgccggcaaaaccgagccagcagaccgcgttgaggttgaattcgtcctggctccactcagagacgcctgacagcaggtaggagcaggtgcaacaccaaagatcgctgcaatattgaaatgtgaatattgactgctaccctcacggatcgctaattagaaggagcaaaaggatggcacgtccaaaattcaactgggacacgtatgcggcgaacgctaaattcgatgaggtgcgcggtctgtgcgtaagtcatggccggcttccgacgatgtataaccccgatagaacgctggtctacctttcgtcacaggacctggccgtcgctgttgatgacttggaagaactgcagacgcttttagctgaggtaaaaagcagcttttttgacacgctcggtgatcaaaatcacagctacaaaaagctttatgagctggaaaccgattacgacttgctttcaaatctgctaagcaatctagatagcccgccagatcattacggtactcgcttgccgaaccagattcaggataagtgacctatcgccgcgccacgttttcacatattgcaaaacgtggcgcggaaacctgacataccaaaacggtagttcagccctccccgatccatcctcaatctgaggtcggactgagtcgaaatcccggccctgtatcactttgactactctcgatttactgcaacagaaacaccctcttcaatcccgccaaaaccaactatttcagtcccattcaatcccgttccgtgtagcaccttaggtgcaccctaaaagcactggatatgcggccagataccccctaatgtgagctttgcaaggctttcaacagctcacagaggattgatcatgtcagtcagcgccagcactaccaaaccccgtggcccacaagccaaacccacccgcgccgaaatcaatgccgcgtggggccgcctacgttcggccgccgaacaaggaagcgttcaggcaagcgctctgctgatcgcgcttgttgagaaccgcacgcttcacgtcgacgccgcttaatcgacccacacatcaaaggtaactcaatgaaaatcggcaaacgctccgtcctcaaagttggcttggccaacctccattactccgaatacgagcactctcaggtagaggcccgaacattcaatattcagcggcccgatggcacgaaaggcacctggcaggccggcggcttgctgaagtcggttcgccaattgcagggcttggcgctggagactttcaaggaccttggagaagaaattctctcgattcgcggaaataaagacctgaacgccgcggccatcgagcgcaagggcaaggagcagattgacgggatcgttcctgccttgatgccggctatggaaaaggcggcaaaggatatgctgacgctggcccaaacagtggtcaacggctttgctccggtcacgcctcgcgcaagctcggacgttgttggcttcctggctgatcaggagctacgagccatcgtgcggagccttaagccggaagagcgccagcgactagtcgcggaggcacgcgcaggcagtcaccccgacgttgtagaggcggtgctcagggcaaacccaatgctctccgggctatcgccagaggcggctgacagcctttcgcgcgcaggcattgccgcctcgcgcgccgaagacattgaagggctcaagcagatgctagcgatctacgatgacgtgctggccacggcctccaatgctggtgtcgcactgagcggtatggtcgccaattcgaatgggtacaccggccggtttgagaagtggcgatcgggctgtgagggctccgaagcacttcgcgaatggctggcgaaaatgcccactcgcaccaccgcaaaagcgtctcctgatcaatccgaagcggcctaactgcccctccgtgcgctacgcaagtattggtagcgccgatcaacggcagactctgtgagtgtgaagacatgacctttcaagagcgttttaccgaagcgtgcaaaacgcagaaattcaaaccctacgaactgatccaggggccggatgccggctacacggtgtgggaggtccagcacgtcagcggcggccagcaggtgaccgtggacgggccattctttaccgaggatgaggccagggtttcggccgatctgctgaggggcacattccgaggcgcccgggccagcgaggcgatttacaaccgggtgtggaactacgacccgcgccaggagcaattgaccatcgatcaggcgcgtatgtcgcgcgcagtgctcgccattcgccttgggcttcctgccccttccaccaatccataggaggccccatggccgttacagcattcgataactcccctatgaccaccatcaagctctacggccagctccgacagttcggcaggtcctacgaccttgccgtgcggacgccggcggaagccttgaaagcactgtgcgtgcagattcccggcttggaacgctttatctcaaatgccaggtcgcgtggattagtgttcgccgtttttcgaggtaagaaaaacatcggggagagcgagctgaactatcaaggccagggcgacatcatcatcgctccagtgatcgtaggcagtaagcgggcaggcatcttgcaaacgatcataggggctgtactgatcgttatgagccccttcacaaatggcgcaactcttgcgccaggcattgccttggccgccggcggcgtgattcaaatgctgagcccacaagcccagggcttgaagtccagcgccgcgcccgagaacacacctggctatgcttttggtagtgcgaaaaatactgtggcatcgggcttgccggtacctctctgcatcggacaccgacgctggggcggcgccatcatcagcgcggctatttacgctgaggatcgggtatgactgccatcgaatattcaccacgcacaaccattctgctcagtggctcactggccaaaaaatatggccgtcgacatacctatgctttgtccgctcacggcgataccagggaggcgctgagggcgatcgatgtgaatcacccgggcttcctgagcgacatcgcgcgagcaaggtctatcggcctggagttcgcaattttccgcaacaggaagaacgtgggcgaatccgagttgactctcggcggggccagggaaataagggtggttccagtgatcaccgggagcaagcgcgccggcatactccagaccatcatcggcatcgtgttgatcgtggctagcccattcaccaacggcgctacgcttgccccagggattgctcttgctgccggtggcgttatccaaatgctaagtccccaggccggcggcctgaagaccagcgccgcgccagaaaacacccccggctacgccttcggcagcgccaagaacaccacggcgagcggcaacccggtaccgctttgctacggcaagcggagggtaggcggggcaatcatcagtgccgccatttacgccgaagaccagatgtagccaggctggtataaagtcacccattaacccacgaggaagaaatatgcacaggattctgctcaccgccgctgccgtgttgctggccggctgttcaagcacgccggtagagccaggttcggccaagcgcgtgcctgccgatcgggtctatgcctaccaagccgccgtcccgggtggtgctacgttggtggtaagccgggataacgggttttgggcttcgggtggctgtatggcgaccgtgctcattgacgggaaaaaggtcgcccgcatcaacactggcgaagtggtgaaattccaggtcaacccgggccgtcatattgtcggcatcgctggtgatgatgagggcaacggcctttgcgcgatgcagatcggccagccagtcaaggagacggcatcagaggtggcggcgggcgaggttcagaagtaccgaatctctggcacgcagaacggaacggatattcgcccttcatctctttaatcactcgtttaactaaaatggataccggtcaaatggatgacaaggagcgattcaatttcgctgaaaaggtttattactacgagcttgaaagaaaagagaaactcattgcgaggctgagtttgccactcgctatattggtagccctgcttagctttttctcctatatgcttgacaaggcaccgataagcactggtggcaccgtggccgtgtttttctggattttctactggtatgcctgcatatgcttgactgtcggcgtgtggaatttctggagagcttggaatctccgagtgttcgacaaagccctatccacacttgaagacatcgaggcctatagaatctcgatgctcaagctctacgcagagttcgaagacggagtggaagagacggaaaaacagatgtctatattcatctataatcaatacgtcaccggatcgactacgaacgcgcttaataacgatcgacgcttgatgtacctgaatgaactgtcgacgttcatggcagcgacgatcttatttgctctgctatctttcataccgttttatgtttaccaccatccataggtaatcgagatgaccacgcagaagccaccaccaccgccgccaccaccgatgcgatttgtgcgagacgacaagcctcgtccaagcctgccgcgcacgcctgagcctccacggcggccccgctaaaatcgctataagggggtggccttacttgccacccctctgcttacctcttcgctttgccccccttcgcttcgacagaacaccgtaatgccaagtatgcctatccagatacaggcttattttgcctttctcgggcttttcgcttgataagtaacacccaaagtgcaacagtattagtagaacgccctaactgatacaggcacccatcatgttcatccgcgcatacctcagagcttccaccgaagaacaagacgccggccgcgcccgtgcctcgctcgagcagttcgccagcgaccacaataaggtcattgcaagcgtgtacctggagaatgccagcggcgccaccgccgacagacctgagctgctgcgcctgctgaaggatgcccgcaagggggacgtattgctggtggagtcgatagaccggctctcccgcctcccggttgaggactggcaaaagctcaaggccgcgatcgactccaagggcctacgcatcgtcgcactagacctgccaaccagccaccagggtatgcaggacaccaagggcgacgagttcaccgggcggatgctcggggcgatcaattcaatgctggtggaaatgatggctgccattgcgcgcaaagattacgagcagcggcgcgagcgccaagcccaaggtatccagaaggcgagggctgccggtaagtatcagggccggccggtggacgaggaactgcacaagcgtgtaaaggaattgctcgatgctggcctgggcatacgagccacgtcaaggcatgcgagctgctcaacgaccacggttttgagaataaaaaacggggcttagcagcagttactttttatcaacgacgggttttttcttttcgttgatcatttcgttatatcgccctacctgaagctgcattagctggttggggagcgtcagtgagatgatgaacgcgagggtggcaagtgaaaggtagattctctcgacccacagaagaatctcagccacgcctgccgcctttgtgagcagatttgcaacgaacaccatgcctaaaacgctcagatagagcatgaataaccatttataccgaattattctgtttacaaaggtggttttcttagacgctgcctctcgccaaattttcgcggtaggcttcggctcgataagcagggtgaggacggtcattaaaaaaccggccaaaatagaaaaaacatcagtaatcatcgaccttgcgtcgttattatcgtgcaccaagggctggccgtgccacccgcaccaaatgctgatgaatacagcgcctagaaagaacgcaatacgacgccagtcaatatccattattgctccagcagcttttggttcttgagttgccccatgtacctgaccataccgtcccagatttcgacgtgactcagagacgtaccaaccttctcaacgtaaatgctggaatgtagttggacatcatggctagttataggcgttccgtcacgagtaacgatagtaaagctgtctatgggggaatcatcatcggaaagcacctcattggccagatcagtaagcgtgtcctgagactccaccgtcgcgcgagagttgccttcgagaccaatttcgagcgctaccaccatgttttccaatgatttttcttgagaccggttaggatctttgctgatcagcgctttcacctcatcaccaacagaagaaagcactcctccgagccatcccttatcagctttgggcaaactcaatttataggcgttgacgttcagacgaatagacctagcaccctgggcattcaggatcgcgacttggttgatgtcgcttgaggcatgaaacttgacgggatctagccggtaattttgcgatctgatcagcgtgtaaaaatatcccgagcacttttgctggctcagaccatggccgcaaaaaagaacgttgtgctcattgacgagcgcgtagcattccccggttttgatttctttgcctgcgggagcccccaagacaccttcatcatcaagttttccacccgccttgggtgtcagcgtcgcaccatgcgtaccaggtgcgtatcgcgctagatggtagagccttcctaccggtgagtctcgaaatcgttggatgcgcacgacatcctcaaacatgaggcgctccgtctgaccaatgcttaatttgtcagagatttcgattagggcttcgctgaagtcgactaagcctccgtcggcatccagcaccctgaagcagtaaatccgtttgatagctcggctcatctaaacatcccgcatccgaaaatgatgaagatgcagaaacgaatgttaaccctgacgatgagcccaagcgaattgcgggcaagaaaagcgaggggtagacatccatttgcacccactacgcacccacgagttataactgcgcggggcaaattcttctaaaccattgaaatttatggtgtcccagggccggttcgaacggccaaccttccccttaggagggggatgctctatccaattgagctactgggacaaatgccaaacgcttaccctgaagggcttgcgacagacggcgtgcatcttaacggccgaggctggttttgtcatgtcgtccgttggcattttgactgtaggccaatccttgcgcgtacgttcatagcctcattcagtatgccacgactttcaccgccatcgtgcaaattgcactgcgccaatatgccatcattgcaaactgcaaccctgcgccctcaaaaaacaaacttaactcgttgtttttattggaataatagattggcacgacatctgcaaagtcataaacacaaaaccaatcgttccaggcaccgtggagactatgatgatgaacagcgcccttctactagcactgaacgctgtggcactggctacggtggtgacgtttcattttcagccgaccagtactgaagacggcacgcaaatcagccaagccattccccaccacctgcaacagcgccctcagttggcactgatgactgcaaacccccagtctcccatccgcctgacccaagatacacaatcagcgccagcggccgagcactgggttttctgagaacactattcatgtcgaaatctgcctggttgtttctgtgcctgacgctcctatctgttgcgctaggcctgggagctacatcacaacaaactcaaaccctagccttcgtcgccagcgccgtgctgggcagcctactggtactgacgctcatcaagggtcgccgaatcaaattcgatccgctcctgcgctaatccccccatctccctcccctaccttatgtcgcctggcactcgtaaataggcgaacagctactaaccttcagcttgagggcaaaaggccatatcgctgtaggacaggcgcccttcaacccagatgccgtataggcttgagcgaagattgacgagcttcgctgcagtcacaggattttttctaaccagtccgcaaaaacgcaaatcagtactggcataaagcctgtaggcggttcaatatttgtcacagaattgacgccaatgaaatgtcaaatctgaggcatgatgcggcctctttgcaattcgggttgaactttggtcgtgagccttgtcttaacactcatcttgcggccaattccagaaaccgctcccctgaactaaccggttaaatatatgcgcccattgaaacaggcaatttattccagccgtacggctgacaaattcgtcgtacgtctgccagacggaatgcgggaacgcattgccgaggtggctcgcaatcatcaccgcagcatgaactccgaaatcatcgcacgcctggaacaaagccttattcaggaaggtgccttgggtgaagagttgagcatgcgcctggacagccccgagctgtcactgcacgaacgcgaactgctgcagcgttttcgtcagctctcccaccgccagcaaaatgctctcgtctcgcttatcgcgcatgacgtggaggcggccgcagaagccaattgattgacacctgaaagccgaagccagccatgtgctggcttttttttgcctggaatttgggaataagaagcaaagcgagggcaggtttgcccccgctggaagggtcagagcaggaagatcgttgccaggcccaggaagatgaagaagccaccactgtcagtcatggccgtgatcatcacactggcccccatggcgggatcgcgacctagacgcgccaaggtcatgggaatcaatacccccatcaaggccgccagcaacaggttaagggtcatggccgcagtcattaccacgcccagggaccaactgccgtagagcaagtaggccaccacgccaatcacgccgccccacaccaatccgttgatgaggccaacagccagctccttgcgcaacagccgcgaggaattggccgtactgacctggtccagcgccatggcgcgcacgatcatggtgatggtctggttcccggagttcccgccaatgcccgccacaatcggcatcaacgccgccaaggccaccagcttctcgatggagccttcaaacaacccgatcacgcgagaagcgataaacgcggtaatcagattaatagccagccaggcccagcggttatgcagtgaacgccagaccgacgcgaaaatatcttcctcttcacgcaaacccgccatgttgaggacttcggtttcactttcctcacggatcaagtcgacgatttcatcgatggtcagacgaccgatcaacttgccgttcttatccaccaccggagccgagatcaagtcgtaacgttcgaacgcctgggccgcgtcgtaggcatcttcgtccggatggaagctcacggtatcgctggccatcaggtcagcaactttcttctccggatcattgaccagcaggcgcttgatcggcaaaacgcccttaaggatcccctcatagtcgaccacaaacaatttgtcggtgtggccgggcaattctttgagacggcgcaggtaacgcaacaccacttccaggctgacgtcttcgcggatggtgaccatctcgaagtccatcagggcgccgacctgatcttcgtcgtacgacagcgcggaacgcacacgctcacgctgctgcgtatcgagcgcctccatcaactcatggacaacgtcacggggcagctcaggggccaagtcagccagttcgtccgcatccatctccttggcggcagccaggagctcgtggtcatccatgtcggcgatgagcgtttcacgcaccgagtccgatacttccagcaggatgtcaccgtcgcgatcagccttgaccaactgccacagggtcagtcgatcatccagcggcaaggcttcaagaatataggcgacgtcggcggagtgcaggtcatcgagcttgcgttgcaactcgacgaggttttgccggtgaaccaggttttcgacgcggtcgtggttcggaccttcctggcggtgcgtgaggtcttcgaccacgcgctggcgctgcagcagctcgataacttgagccagacgatcctgcaggctttcttgtgttttctttacttctacttcggtcataggcgaactccactcccagcagcggggcacgccggaaggatcaatcagtcaattcatgattggtaaaacggggtactgagtaactactgggtaagtccatggaggtattccacaagccccggcggggctgacgggcgcatgatacaccgcccggacgttttaaacgttaaaaaactggaaagaacaagcgcttgcacgccaaagctcagtattggctgcatctatgaactgcgacgacgcaggcgcgggggaaaacacatgaggagggagaaaaaggagaacgccggataaaagatacacaaaccccagacggcaaaaagcccgcactaggcgggctttttgtttgtatggtgcactcgacaggattcgaacctgtgaccgctcggttcgtagccgagtactctatccagctgagctacgagtgcagattgtgtttttagaccagatcacaactggttggagccaagctacctgcatcgctgcaactaactcttaaatggtgcactcgacaggattcgaacctgtgaccgctcggttcgtagccgagtactctatccagctgagctacgagtgcatttgttgccgcgcattataggccgttcaatctctatgtaaagctattttttcgagtattttcaacaacttaccgaaaaaaccagattgcaacgtactaagcaaataatggcggagaacgggggattcgaacccccgacacccttttgaggtgtactcccttagcaggggagcgccttcggccactcggccagctctccgcaacacggggcgtatattaaccacgttcctccccgtttgcaaacataaaaaacgataaaaattaaaggcttggttcttcgtccttctctttcttgatccgcaggtagatttcctcgcggtggaccgccacctctttcggagcattaaccccaatacgtacttgattgcctttgacgccgagcacggtcacggtgatttcgccatcaccgataatcaggctttctgcgcaacgacgagtcagaatcagcatacctttcacctcacgcatttcagttcaggaacaacagtctgcaaaaaaaaagcattcaacctacaaccaaaaggtcgtagccctactcgctaagtattgtcgagcccatgcaaaagaccatgcaccccacaaaaaaatgaaaggcgcggtaaaccgcgccttcctggcaacgcatcactcgccctgtcgggccggagcatccaactcaaaagccgtatgcagcgcgcgtacagccagttccaggtacttctcttcgagcactaccgagactttgatttccgaggtggaaatcatctggatgttgataccctccttggcaagggccccgaacatacggctggcaaccccagcatgggaacgcatgcccacccctacgatcgacaccttggcaatcttggtatcgccgaccacttcacgggcgccaatctcgctcgccgtgttctgcaggattttcaatgccgcatcgtattcgttgcggtgcacggtgaaggtgaaatcggtggtgttatcgtgcgaaacgttctgcacgatcatgtcgacttcaacattcgcatcgctgacagggcccagaatcttgaaagccacgcccggggtgtctggcacgccacggatcgtcagcttggcttcatcgcgattgaaagcgatgccggaaatgatcggctgttccatggattcctcttcatcaatagtaatgagggtgcccggaccctccttgaagctgtgcaatacgcgcagcggaacgttgtacttgccggcgaactccaccgcgcgaatctgcaacaccttggaaccaaggctggccatttccagcatttcttcaaaggtgatcttgtccaggcgctgggccactggcaccacgcgtggatcagtggtgtagacgccatccacatcggtatagatctggcattcgtcagccttgagcgctgccgccagggccacaccggtggtgtccgaaccgccacgaccgagcgtggtgatgttgccgtgttcatccacgccctggaaacccgctacaactaccacgcgccctgctttcagatcagtacgaattttctgatcatcaatttgcaggatccgcgccttggtatgtgcgctgtctgtaaggatgcgcacctggctaccagtgtaggacaccgctggcacgccacgcttgttcagcgccatggccaacagcgcaatggtcacctgctcgcccgtggagacgatcacatccagctcacgcggcagcggctgttgatcaccactgatggccttggccagatcgatcaggcgattggtctcgccactcatggccgacagcaccactaccaggtcatcaccggcatcgcggaacttcttaaccttgtcggcgacctgctcgattctttcgacagaaccaaccgaggtgcctccaaatttctgtacgatcaaagccatttccaagccgcctcagcccgtaaaggggcgcctaatatccaatccacctgcactgaacaagcccgtgactagaccacgggccggttaacagtgctttaaatacctgcctcgacaaatggcacggtcaaggccagggccgcgtccagggctgcggcatcgacaccaccgccttgcgccatgtccggacgaccaccgcccttgccgcccactgtcgcagcggcttgcttcatcaaatcaccggctttgagttggccagtcaggtccttggttacacccgcaaccagaacgaccttatcctcatggacactgccgagcaggatcactgcgcggccgagcttgttcttcaactgatcgaccaaggccaacagcgccttgccatcctggccgtccaggcgcgccgccaggacttttacgtccttgacgtccaccgccgcggccgacaggtcatcgcccgcagcgctggccgctttggcctgcaactgctccagctgtttttccagcgcacggttgcgctccagaacggcggacagcttgtcgatcaggttgtcgcggctgcccttgaccaggccggccgcttccttgagttgttcttcggctgcattgaggtaagccagggccgcagcaccagtcaccgcctcaatacgacgtacgcccgaggccacaccaccttcgctgatgatcttcagcaggccgatatcgccggtgcggttggcgtggatgccaccacagagttctaccgagaagctgccgcccatactcagtacgcgaacttcgtcgccgtacttctcgccaaacagcgccatggcgcctttgttcctggcggtctcgatatcggtttcttcggtttcaaccggggtgttcttgcgaatctcggcgttgacgatgtcttccagagccttgatctgctcaggcttgatcgcttcaaagtggctgaagtcaaaacgcagacgctggctgtccaccaacgagcctttttgctgcacgtgctcgcccagtacctggcgcagtgcggcatgcagcaagtgagttgccgagtggttcaacgccgtggcatgccttacgtcagcgtcgacctgggtgtctaccggcgcacccacggtcaagttgcccagcaccagcacaccgtgatgcaggaaagccccgccggtcttggtggtgtcgcgcacatcaaaacgaccggatgtcgagctcaggaaaccgcaatcgccaatctggccacccgactcggcatagaacggcgtctggtccagcaccacaaccgcctcttcaccttcgctcaacacgtcgaccgacttgccgtctttatagatggcgatgatcttggccgagcccgcagtggccttgtagccggtgaactcggtcggtacgtcgaccttgaccagggtgttgtagtccaggccaaaggagctggccgaacgtgcacgcacgcgctgggcttccatctcacgctcgaaaccggcttcgtcgacggtcaactcacgctcgcgggcgatgtcggcggtcaggtccatcgggaaaccataggtgtcgtacagcttgaacaccacatcacccggcaccacggtgcctttgagctcagccaggtcctgttccagaatcttcaggccgtgctccagggtcttggagaattgctcttcttcagccttgagcacacgctcgatgttgctttgctgttgcttgagttccgggaaggcatcgcccatctcggcaaccagtgcggccacgatcttgtagaagaagctgccggtagcgcccagcttgttaccgtggcggcacgcgcgacggatgatgcgacgcagcacgtagccacggccttcgttggacggcagcacgccgtcggcgatcaggaaaccgcaggaacggatgtggtccgacacgaccttgagcgaagactggccttcattggcacagccaatggccgccgccgaagcgctcagcaggttggtgaacaggtcgatttcgtagttggagtgaacgtgctgcatcaccgcactgatccgctccaggcccatgccggtgtccaccgacggtgccggcagcggatgcaacacaccatcggcggtgcggttgaactgcatgaacacgttgttccagatctcgatgtaacggtcgccgtcttcttctggcgagcctggcgggccaccccagatatcgtcgccgtgatcgtagaaaatctcggtgcacgggccgcaagggccggtatcgcccatggtccagaagttatcggaggcgtaaggcgcacctttgttgtcgccgatacggatcatgcgttcggcaggtacaccgatttgctgggtccagatgtcatacgcttcatcgtccgtcgcgtacacggtgacccagagtttttccttgggcagcttcagcacgccggtgaggaaggtccaggcgaacgtgatcgcgtctttcttgaaatagtcgccgaagctgaagttacccagcatctcgaaaaaggtgtggtgacgggcggtgtagccgacgttttccaggtcgctgttcttgccgccggcgcgtacgcacttctggctgctggtggcgcgggtgtaggcgcgcttttcctggcccaggaagcagtccttgaactggttcatccccgcgttagtgaacagcagggttgggtcattgcctgggatcaaggagctggaggctacacgggtgtgaccttgctcttcgaagaagcgaaggaaggcttcacggatttctgcgcttttcattaggttcttccacggaggctgcggccaaaggccagtgcgcaacatcatcagacggagcgacggcaaagggccgcattatatcggccctttgccggtggtacagcgtgtttatgtgatagaaacagtcaattagacggcctgcactgtcatttctgcgaaaacgcgacgaatgtctgcagcacttgctcgatctgcgcccggctcacatccagatgggtgaccatgcgcaagcgcggcgcggcgctcaacttgaccccacgctcggccgcaaaggccttcagcgcctgcgcctgatcgcctacctgcacatacaccatattggtctgcaccggctcgacgctgtagccggccttgcgtaactcatcacccagccattgggcgttggcatggtcgtcagccaggcgctgcacttgatgatccagcgcatacagccccgctgccgccagggagccggcctggcgcatgccgccgccgaccatcttgcgcaagcgccgagccttggcgatcagcgccgtcgagccacacagcaccgagccgaccggcgcgccgaggcccttggacaggcacaccgacaccgaatcgaaatgctgggcgatttctcgcgcatccacgcccagcttgaccgccgcgttgtagaggcgcgcaccatccaggtgcagggccaggccatgctcgtgggtaaatgcacgggccttggccaggtaatccagcggcagcactttgccctgcatggtgttttccagcgccagcaggcgtgtgcgggcgaagtggaagtcgtcgggcttgatggcttcaagcacctggttcagatcaagggagccatcggcttggacttccaggggctgcggctggatcgaccccagcaccgccgcgccgccgccttcgtatttgtaggtgtgggcctgctggccgacgatgtattcctcgccgcgctcacagtgagccatcaacgccagcaggttgctcatggtgccggtgggtacgaacagcgccgcggcaaagcccaggcgctgggccagttcggcctccaggcgattaacgctgggatcttcgccgtaaacatcatcgccactgacggcgctggccatcgcgtcgagcatgccgggggtgggttgggtcacggtgtcgctgcgcaggtcgatcacggtcatcaagggggcctctaacggaatggataagtccttttgtgtgtgattactgcgggcaaagccacggaatatcaagccccgattacattcattcgaataccaaccaaacaaaccgatataagttatcgagacggcaaccgtgcagtttttgaaaaaccatgttaaaaactctgcgccgccagggttctggcggcaacgttctcagggcggggtgcaattccccaccggcggtaattgcacgcaatgtgcatagcccgcgagcgcttggcgcctcgaactgctcaggcaggacggcgacaaggtcagcagacccggtgtgatcccggggccgacggtcatagtccggatgaagagagaacgggattggcacctaagggccgcgcgcctgtttgcgcatgcgtacccttaaatcccattcgattcataacgccctgtttttttcttaaacaggagtcagaacatgcaacccaccgcaatcgacagcaaaagcaaaaaccatcacggcgagcgcgtcgcgtttatccaggcctgctggcacaaggatattgtcgaccaatcgcgcaaaggcttcctcgccgaaatgatcgctcagggctatcaggaatcggacatcgacttcttcgaagtcggcggcgcctttgaaatgcccctgcacgccaagctgctggccaagaccggccgctacgccggcatcgtcgctgccgcgctggtggtggacggtggtatctaccgccacgaattcgtcgcgcaatcggtggtcagcggcctgatgcaagtgcagttggagactgaagtgccggtgttctcggtgtccctgacgccgcatcacttccatgccggtagcgagcacaccacgttcttctacgagcacttcgtgcacaagggccaggaagcggcgcgcacctgcgccgatacgctgcacaaggtgcgcgcgatccgtcgtagcgagccgcgtgcggtagcggtctaaattcagtgtgggagctggcttgcctgcgatgcagacacctgggtgtatcagtgatacctaggtgatgctatcgcaggcaagccagctcccacattggaccgagccagacttggctctcaggccaggccggcatccgtggtgggcacgatcagtatcccggcgcgcaagccgttcctcaccttagggttggggaagataatgcgggcgccctcctcctcgatcacccaacgggtcttggccacgtcttcggccagcaggtagcccctttccaattccgaaaagttttccacatctgcgggcaggtgcatcaggaaggcgtcgctgtgcttgatcacttctcgcgcaacggcgaagagttgcaggccgtcgaggctaccggtctcgggctcgttgccctcgatgatctgcttcagacgcgcttccaggcgcgacacgtccacaccgtcgttctgcccgaacggccgggccttgcccaactccagggtgaacgcctcggcgccgagttgctcgtaggtaaacgcggtgaaggtaatcgaggttttgttctgcagcagcaccgcctgcatgccggccgcgttcaagcgctccagctcacggcgcgaatgctgtcggtcttgcttccacgggtacaacgcgaactgctcgattttcgaaccacgaatcgcggtatgcaggtcgtaatgcaggcgcgagcggccaggctggctgaaaaagctgcgggccaattgctcaagctcggcggcgcgcatggcttcggggccgatgttttgttcatgacggccgttgaacagccggttgacgtccagttcgaggtaacgctcaccgcggcgcatggcctcggtattaccgaacaggaacagaatacgggtgcggggcttgatctccccacgggcgatgccatgcaacagacggtcgagcagttcgatcggcgcggtttcgttgccatggatgccggacgacagcagcaagtcgctgccgttgtccaaagcttcaggaggacgcacttcaagcgcgccttcgctgagccagcgcatctgcacgccgtcgacagtcagttgaattttttgcgccggttcacgaccggcgagggtcagttcaagcagtttgccgagggcgagcataagcagcttccttagtggttgcagcctgggccgtggacgtgatcgtcgtcgtcaccttcaacgtcggccggttccatttccagttgcaggctcatcaggttggtggccaatgggcgcatcagcaggttggcgtactcggcgtcgccttcttctacgtccacgccaatcagcagttggccgcggccatcgtgctggatccagatctccttgccctgccagaccacggcgacgcgggtgcaggaggtttccagctgggtgccgtcggtgtcttcaaggatgagtttcagggtgtcggtcataaataaaatatctcagccgtgtggcattaattgatctggaaaggataaaccgagcccagtttaaggatttgcgtcagttcatccagtgccgtccggcactcaagcagtaactgcgggtcagccaggtcggtttcgcgcaggctgtcgcggtagtgcttgcccacccactgggtcagggtttcgtacaacggcgcggtcatgataacccctgggttcacggccgccagctcggtttcgttcaacgccacacgcaggcgcaggcacgccggcccgccgccgttctgcatgctttgcttgaggtcgaagaccttgacttcgcggatcaacccgccggcagcggtcaaaccttgcaggtactgccacacacgctcattggcgcggcactcttccggcacgatcagcagcatcgaaccgtcaggacgagtcagtaactggctgttgaacaggtaggaacgcaccgcgtcctcgacactgaccaacgcgcggggcacacacaccgattggaagttgccgcccaacttgcccagcttgccgtgcagttcggcgagcatctgttcggtgttgaggaacgcatcctcgtgatagaacagcacttcaccgttgcccaccgcgatcacatcgttgtggaacacacccgcatcgatcaccgccgggttctgctgggcgtagaccacaccgtcatccttcaagccatgcaggcgcgcaacggcctgggaggcttcgagggtctggcgcgccgggtacttctgcggggccgggtaacgagggtcgaaagcactacggccgaacacgaaaaactcgacgcccgcctcgccgtactcacggcagaaacgcgtgtggttggccgcgccttcatcgccaaattgcgcgacggccggcaaggcggcgtggtgagcgaagtgcttgccatcggcgaacatcgcccccagcacgcggctggtggtggggtgttcgatgctgcggtggtatttgcaattgaggttggcggcagtgaaatgcacgcgaccgtctgcggtgtcggcgcttgggctgacggtggcggcgttggctacccacatgctggaagccgagcagctcgctaccagcaacggcatggcctgcttggccgcctgctcgatcacctgggcgtcggtgccgctgaaacccaagctgcgcaaggcggccacatccgggcgttcctggggcgccaatacaccttgcacaaaacccatgtccatcagggctttcattttctgcaggccctgcaacgccgcttccttcgggttggaagactgctggctgttgctttgggacgcgacgttgccgaaggacaaaccgccgtagttatgggtcggccccactagaccgtcaaaattgacttcacaggatttcatcggcgaggctccacgaacatctgtttttataggcatcaactgcaggtctatatctgttaacccgacccagtgtgggagctggcttgcctgcgatgcagtcgactcggtctttcagccaaaccgaggtgatgccatcgcagcgatgcggcgatccgacaagccagctcccacattagatcggtgtcacccttacttcagcgttatgccgggggtcagcgtggctggcacgaccaagctcggcgtctccagcgacgccaccgggtacgcgcaataatccgccgcgtaataggcactggcgcgatgattacccgacgcccccacaccaccgaacggcgcggtactggcggcgccggtcagctgtttgttccagttgacgataccggcgcggctttccagccagaactgctggtaacgcgcctcggagtccgacaacaggccagcggccaggccgtactgggtgttgttggcctcagcgatggcgccggcaaaatccgcgtagcggatcacctgcaacaacgggccaaacagctcttcgtcttcacgttccgtcacagcggttacgtcgatgatgccaggggtcagcaatgccgcctgagcctgaggctgggtcatctccagcagcgccacggcgccattggccaacatcagttcctgggcttgcatcagggatttggccgcagcaagggagatcaccgagcccatgaacggcgccggttgctggtcgaaagcacccacttcaatgctcgcactcaccgccaccaggcgcgccagcaaggcatcgccccaggcgccttcaggcaccagcaagcggcgggcacaggtgcaacgctggcctgccgagataaacgccgactggatgatggtgtacaccgccgcatccacgtcggcgacttcgtccacgaccagcgggttattaccgcccatttccagggccaggatcttgtccgggcgccctgagaattgctggtgcaagtggttgccggtgcggctggaaccagtgaagaacaggccgtcgatgcctgggttggccgccagggcgatgccggtttcccgcgcgccttgcagcaggttcagcacgcccgccggcaacccggcttcgacccagcactgtacggtcagctcggcgaccttgggggtcagttcgctcggtttgaacagcacggtgttacccgccagcaacgccgggacgatgtgcccattgggcaagtgcccagggaaattgtaagggccgaacaccgccaccacaccgtggggtttgtggcgcaacacagcggtggcgtcgcccaggaggccgctcttctcgccggtacgttcgcggtagctttgtaccgagatcgcgatcttgttggccatgctggtaacttcagtggccgactcccacaggggcttgccggtttcttcgccaatgcagcgggcgatttcatcggcacggcttttaagcgtggcggcgaaggtctccagcacgctgatgcgttcttcgagcgggcgcttggcccaccccgggaatgcctggcgcgcagcctgcacggcggattcgacctgttcggcgctggcgccattgccggcccacagcacttgctgggtcaccgggttgcgcgattcaaacagttcaccctggccagccagccagctacctgcgatatacagcgaattcattatttcgactcccgagcagcagacaacgcaacagcacgcacttgatcacccaccaccagttgcaggcgcttggcagtctgtggatcgaccaccagggtgcctgccgccagccgggccggagcggcggtgatacggcattcctcgcgcttgcggttatggatcaggaacggcgtggcatcgtcccccggcgtgccgatggccaacaccagtgactggctgtcgcgcaccgcacggatcttgctggtttcacattccaccgccgggcctgcgtcgaaaatatccacatagccctggtagctgaagccttcgctcttgagcatgctcagggccggctcggtgtccgggtggaccttgccgatcacattgcgcgcgtcttcggagagaaagcagctgtacagcggaaacttgggcatcagctcagcgataaatgccttgttgcccacgccggtgaggtagtcggcctggctgaactccatcttgaagaagtgccggcccaggctttcccaaaacggcgaacgcccggcgtcgttggacaccccgcgcatttcggcaatgatcttgttgccgaacagttgcgggaactcggcgataaacaacatgcgcgccttggccagcatgcgaccgttaaggccgttgcggtaatcggcgtggaggaacaacgagcacaattcggaattaccggtgaggtcgttagccaggaacagcgtcggaatctcacggtagatattcagttcctgggacgcgctgacggtcagccccacccggaagttgtaccacggctcgcgcaggccaacggcgccagcgatggcagaaattcccaccacgcggccttcgtcgttttccagcacgaacaggtagtcggcatcgccgcgcccggcttcgccgcgaaaggttttttctgcccagcccacccggtgggtcaggcgctcttcgttggccggcaaggtggtaaggccggtgccagtgctgcgcgccagatcaatcagggccggtaaatcgctgctgcgtacgggacgaacgatcatgctatctcctcgaacgggccgctgttgtcagccacccgcgaaactctctttttaaaccgcaaccaggcgcacgctggcgccttcgccaacacccagcgcttcggcggccgccaggtccagggtcaccggtttgccgggcgcgtagtccagctccagcatcaccgcacggtaatcctgcaactgcgcgttgctcaccaggtactggcggccaacgcccttgaccatctcaccgatcttcaccggcactacgcggctctgggcgatcgagcgaatgcccgagacccgggcgtgcagcgtcgggccaccgtcgaagatgtcgatgtaatggtcagtttcgaagccttcacgcatgaggatgtcgaaggtgatttgcgcacgcgggtgcacctggcccatggcctcttgcgcttcgtccggcagcagcggcacgtagatcggatagtgcggcatcagctcggcgaggaaggtacggcttttcagcccgcacaggcgctcggcggcggcgtagttgaggtcgaagaagttgcggccgatggcatcccagaacggcgagtcaccgttctcgtcgctgtagccgacaatctcggtcaccaccgagtcggcaaagcgctcgggatggctggcaacaaaaagcaggcggccacgggaattgagttccgaccacggcgaaccgaccagttccggcaccacatagaagctggtgagcaggctgttgccggtaaggtcgtggcactgggaaagcacgtggatcttgttgtggatcttcagctcgcgggaggcgtgcacgaaggtttcgttacgaaagctgtagaacggctcggagtaaccggccgaggctacgatggccgagcagccggcgagcttgccggtctcggtgtcttccagcacgaagaaatagctctcttcaccgttgaaactcacctcagcggcgaaggacgcttcgctggccgcgatcttgtcgctcaggcgttccacatcatccggcaaggaggtgacaccaatcgggctgtccgcagccagacgctgtacctcgcccagatcagccatttgcgcggggcgcatcaccagcatggtgtcactccttaactcgaaaactcacagaggaaaaaatgccggacacgggccctggatacacatcggtctcaatgtgtcagcagatccatgtgggagctggcttgcctgcgatacaggcaactcggtctatcaacggcaccgaggtgatgctatcgcaggcaagccagctcccacatttgttcaggtccggccaataaaatgtgtcgctatcaggcttgcgtcaacgtcttcacagcacgctcaaaacgatccaggccttcgttgatgtccgcctcttccaccaccaggctcggtgcaaaacgcaccacgtcggggccggcttgcaggatcatcaagttctctttttcggccgcgttgaacacgtccttggccttgcctttgaaggcgtcgctcagcacgcaaccgatcaacaagcccatgccacgcacttgggtgaagatgccgtactgcttgccgatctgctccaggcgcgccttgaacaggtcgtgcttggcattcacccccgccagcacctctggggtgttgatcacgtcgatcaccgcttccgctaccgcgcacgccagcgggtttccgccgtaggtggtgccgtgggtgccgaccaccaggtgcttggccaagtcttcacgggtaagcatcgccgcaatcgggaaaccgccgcccaggctcttggcgctggtgaggatgtctggcgtcacgccgtaatgctggtaggcaaacaggtggccggtgcggcccatgccggtttgcacttcgtcgaataccaacagtgcgtcgtgggcgtcgcacagctcgcgagcgccttgcaggtaagccagttcggccggcaatacaccgccttcgccctggatcggttccagaaccacggcgcaggtcttatcggtcaccgccgccttcagcgcagccaggtcgttataaggaacgtgggtgatgccggtgattttaggcccgaaaccatcggagtacttcgactggccaccgacgttgacggtgaacagggtacgaccgtggaagctgttcagcgcggcgatgatctcgtacttctcgctgccaaaacggtcgaacgccacgcgacgggccagcttgaaggcggcctcgttggcttcggcgccggagttgcagaagaacacgcgctcggcaaaggtggcgtcgatcagcttgtgggccaggcgcaaggccggctcgttggtgaacacgttcgaaacatgccacagcgtgttggcctgttcggtcagtgcccccaccagcgccgggtgggcatggcccaatacgttgaccgcgatgccgccggcaaagtcgatcagctcgcgaccggcctggtcccatacgcgcgaacctgcgccacgcacggggataaaggcagcaggtgcgtagttgggcaccatcacttggtcgaaatcggcacgttgcaccggggcttgctcaacggacatcggagtctcctgaagaggaacgcctgcctggaactggcaagcgatgcagggattgtaaggacagttttcagcgccaccttgtcgccaagcgacaacttcttatagcgccaaccccggttttaggcgggtttacggcaatgcgacatattgcgtcgcaatggcgcagtgtaaacgctgcgctcagtgagaggcagaggcacggcccgctgattttcgcctaatgccttaactatctgctgcccgcgaacccatcaggcttgctgtgatgacagtgactcgcccccactgaaggatcagccccgtgcccacgccctaccccacgacaatcagccaacgcctcgcagtcgccgccacccaagtacctgctgggtttcacacacgcctgccggcctggctggcaagcgcctcggatgacaagcgccaagccttgaagaatgcaccactggacattgccaactggcaggccgacgccagccgccagcaacacgcgcccctcaagcaggcggtggagcagagttggaccgcgcaaagcaaagtggacacggcactggccgacctcaagacaccgcaagccttcgccgcaccgcttttgcaacaggcgctcaagacccgctggggcgtggacatcgatgtcagcaccacccatctgcgcctgtatgcgcccctgacgatcccgctgtttcccatagaaactggcggcgtcaaagtctggaccgtgtcgttggtggacgccgcactgcataacttcgacgcagcagagagcgagaaagctgccttcaccgcagactccagcttcattacccaacccaccgccaccgggcaattcgacaccctgccctcagtgaacagcaaagtcagcatccagaccttcgtcaggctgtgccgtgaactggacatcggtgcgcaataccagaactacctcaagacatttttcggcttcaaagatgccaaacgcaaggcttcgctgcgcagcactgtcatcgagagtctcaaagccgaggcccaaactgccgtacacctggcgcgcctgaaaaaggacggcagcgagcgggtgttacgcacgctccaggcccaactcaaaggcatcagcggcctgacgctcgacggcaagacgctgctcagccacgagctgagcctgatgggcgcaccactggccggcattgtgctgttcgccgcagacctggaactgcaccacagcgcagtgcccgtggtggcgtacattcccggcgacccacaggcaccgctcaagtattaccgcgatggcatcgcattcattcaagacctgaccggcaaattgcgcgatgccgattaccaggcattctttagccgctttataagccacgagcaccgcgccaatttctttgccaacctgcataaccgcttgtcccagattacctggcatcaccccctccccggcgaccccaggccgacctggcgcgccgaacctgtggccaatcccaagctgcagttgcacgcgacgaaaatcacgggcgagctgtacgaacacctctatgaaagcaaactcaacaggctgctcaatgacgcgcacaacattgccgtgtccaccgccgacgccgacagtaaggcacgctggcaacgttgggacatcgtggcaaaaatcggcaaaaccctgctcgaaatcgccgctttcatcgccacgccgttcattccccccctcggcctgctgatgctcggctacaccgcctatcaactgctcgacgacgtgttcgaaggcatcattgattgggccgagggcctcaagcgccaagcgttcgggcacctgatgtcgatcctggagcaaatggttcaattgggtatgttcgcggtcggtgcaccgattgccgaagggctgctacgccaggcactgcctcgggaagtctgggcgtttttcgagcgcctgtatccggtcacctcggacgacggcaaaacgcgcctgtggaacccggacctgagcccctacgcccacgaccttcagttgcccgccgcctcacgccccaaagccgatggattgcatgcctatggggacaaacagatcctaccccttgaagggcaacactttgccgtcaagcaacaagcgggcaacgccgtgctggcgcacccaagccacgtgaatgcctaccaaccgcccgttatcggcaatggcaaaggcgcctggataaccccactggatcacccgctgacatggcatcgcagcaccttgttgcgcagactcggcgagcccgccaacgcactcagcgaaaccggcctggaacaggcgcaacgcatcagcagcacagacgatggcgccttgcgcaaactctacatggaccgccaaccgccaccgcccttgctggccgacagcctcaagcgcattcacatcgaccagcaactgcaagacttcatcgaccagatgaacagcgacgacccgcaggtttatgccaaagccgacccgcagacccagctctggctgctaagccataccggcctgtggcccgaatccaagaccctgcgttttttgaatgccaagggtgaaaccgtgtgggagcacccgggccaggcaaacgctgcggtggcgcagatccacgaagcgcagatgaacagcggcgacctgctcaagaccctgctggaaacccttgatgaatcagagcgcaaaaccctgctcgaagaagactttggtaccccgaccacccagctgcatgtgcgtgccgcaaagctgcgcaaacagctggcacgcagagccgaggataaacgcgcttcgatgttcgactcgcgctatcgaggcctggagctgaccaccgatgcgcgcgtacagaagatcatcgacagcacacctgggctgcccgtcagcgcggccgaggaagtcttgctcggtgccagcggccaggacttgctggacatcgaccagggcacgctgccttcgcacctgattgaacgtgcgcgctggatggcgcaccacgtcagaatcagccgtgcctatgaaggcttgtacatgagtgcactggaaaaccaagacacccaccgactcgccctgcactccctggaaaaactgccgggctggtcgtcgcaggtgcgcctggaagtccgcgactttaaccgcaccggcaccatacgggacgctatcggcgccgctcaggcgccgattcgacgcttgctcgtgcgcaccatcgaaggcgactacattcccgaagacagcaagggcaccctgcttggcgaaacagacttttacaccgccgtgctccaggcactgcccgatgcacagcgcgacgcgttgactctgcacatcggccaaggcccacgcttgagagagactttgcgccaacacgcattggcgcgtgacgagctcggcgccctgctggccgaggtgccactgctcaagccgccctatgaccctgggttgatgcgcctgcccggcggcatggaaggctacgatgccagcccacccaccgccagcagcagcgagaatgtctcgctggagactcggttgcacgagctgtacccgcaactgagccccggcgaggtgacggccgtactcgccgccatgcaaaacgaccccggcacccctttgggtactcttcaattcttgaagcaagagttcgcgcaactggaaaccagcctgcggggatggcagcagaatgtgccgcagacgctggtgggcaccgacctaccgttaaaccgctggcggattgcttcggagcagcaaaaccgctttctctggtcacaaaaattgatcagcgcctggcgccacgacacgccagtggacgccgcgtatgaaaacggtcacctgttgcagctcaaccaacccatctacggcgaactgccaacactcgatgcccgtctggggcatatcaccacgctggaattccagggctacttgaccacccgcggcacgccgggcttcctggcacacttccccggattgcgccgactggccatcagcgacattaccctcagcacactgcccggggaaatcagtgcattgacccaccttaacgcgctggcactgcgcggctgcgcactcaacctgaccaccccaacccgtgcagccctggccaacctgaccgaactgcatacccttgacctgtccaacaacccgctggtgctggcgcccaatttcgaaaacatggccaacctgcggacactcaacctgagccactgcagtatttccgtctttcccacaggcctgctcaatcggcctcggctggccaacgccaatctcagccacaataacctgcgcaggctgccagaagccctgtattcgttgcccgccagcgctgccaaggcctacgatctttccggcaacccgttgacgcgcgcaaccctggaacggataaaaacctactgtcagagcaccggggaacattttggcgtccaagccaatccagaggaggttcgcctggtccaggcgctttacccgacctacaacgctcccgaggccaatcaatttatcttcaggctgccgggcgggctggatgattcgatggcaattctcgtgcgcctcaaggccgactacgaacgcttgcaagccgacctgcaggaatgggtcgtggatgtgcctgaacgctaccccttcacggacctgcccatggacgaacaggctcgcgtacagcagcaacttatccgaggggaagtcagcggcctgctggagcaaggctggcgacgtgaaaccagcctggatttgagccatgacccgctgacacaatctcatcaaatggcgttggcgtcgccgctgttgggcgacctgcccaaactgaatgtggatttcaagcatatttccaagctggacctaagggcccaggaaaccacctcgatacccgacggttttcttgaacgcttccccaatctggaaagcctgctgatccaccgctatgccctgcaagacattcccgccggcgtcttcaagctgcccaagttgaccacactcagcctgacccaatgcaatctgcgcctgaccgccgacagtgtcgccgccttgagcgacctgcacaccctggaatacctggacctgagcgataacccgctggcgctgacgcccgacgtcagcaaaatgtccagcctggagaccctgatgatggagaacgcagggcttaccgaagtgccgcacggggtgttcaatctgacgtcactcacccaactgaatctgagcgataaccgcatcaccgaactgcctacggatctgcttgaagtggacccggactcagcggctggttttgacctgagcgacaacgcattctcacctgcggcgcttgccctcctgcgtcgctattacaaccgcatggcagtggatttcgatgtagcccaagctcgacagcccgcgccagacgactccggctcaagctccccgacttcatccgaaacagacaacgaaccctgagcgcagctcaaccgcgctcggagggcaccgacgacaactcgaacgggctgctgctgcgccgctggttacggtcttcgcgaggggtggcgccgaagaaattgcggtaggcgctggagaagtgcggccccgaggagaagccgcacgacaagccgatctggatgatcgacttgctggtttgcatcagcatctggcgcgccttgttcaggcgcaactccaggtagtactggctgggaacgcggttgaggtattgcttgaaaatccgttcaagctgtcgtcgcgatacgcacacatgttgggcgatttcgtcagtggtcagcggctcttcgatattggcctccatcagcaaaaccgcctgggtcagcttcgggtggctggaacccaggcggttttgcaacgggatgcgctggcgctcgccgccttcacggatgcgctccaccaccagctcttcggacaccgcaccggccagctcggcgccgtgatcacgggccaataccgccaacagcaggtcgagtaccgacatgccgccgcaggcggtgaggcgatcgcggtcccagtcaaatagatggctggtggcaatgaccttggggaaacgctcggcgaaatcgtcctgccagcgccagtgcacggcggcgcggtagccatcgagcaggcccaactgggccagcgggtacacacccgccgacaagccgccgattacacaccccgcccgaacaagctgcttgagcgcggaactcagtggcgaagcgatgaccgtcggcggttcgtcggccaacaggaacagcttctgaaagccctccagcttaccggcccacggctcacccggcagttgccaggcaccttcgatggcgggctctgcgagcaaaaacgacagctcgtagatcacatccggatgcacccgctgggcaacgcgcaaggcctcctcagccagcgcaagcgtaagggcttttgtgctgggccaaatcaggaaaccaattttgtgggcggtcatggagtgctatccaaagcgaaaacagtgatgagggcatgggccaatgctagcccgtaatcaactacaaatcccaaaacaaactgagatcaaaagtgggagctggcttgcctgcgatagcggtaggtcagttaacacatcattgactgatgcatcgctatcgcaggcaagccagctcccacaggagatcggggctcacctcaagactgcggagcatgcactatcgcggtgcacaaaagcagtcttgattatttcaagctgccagagaggaactgctgcaaacgttccgactgcgggttcaccagcacttcccgcgggttaccgcgttcttcaaccacgcctttgtgcaaaaacaccaactggttcgacacttcgcgggcaaagcccatttcgtgagtcaccaccaccatggtgcggccttcctgggccaggtcctgcatcaccttgaggacttcgcctaccagctctgggtcgagcgccgaggtcggttcgtcgaacagcatcacctccggttccatcgccagggcgcgggcaatcgccacgcgttgctgctcaccgccggacatatggccggggaacgcatccttacgatgacccacaccgactttagccaagtagtgctcggccttttcacgggcttctttcttcgacacgcccagcacgtgcaccggagcttccatcacgttttcaagcgcggtcatgtgcgaccacaggttgaaatgctggaacaccatggacaggcgcgaacgcatgcgctgcaactgcttggggtcggcggccttcatggcgccgtccttgttggcgaccagtttgagctcttcgttattgagcagaatcttgccggcgtggggttgctcgagcaggttgatgcagcgcaaaaaggtacttttgcccgaaccactggagccgatgatgctgatcacatcaccggcggcagctgccagggatacccccttgagcacttcatgactgccatagcgtttatgcaggtcttggacttcaagcttgtacatgcggtcggttctcacaaaaacaggtggtcagtcgttgagcaagcgcccgcagcgcagcgcttcgcgccccgccaccttggccagccagaaacccgcttgggcataacgtagccgttcaacggcaaacaatacccccgaggtgcccgcgcaaatggtgcttacgcggtcggtcagggggtcaatcacttcaaaaatctcatcgccggtttctacccagtcgcccgctttacgcaggtagctgatcaccccggcgtggggcgcgaacaacagctcggtgccttcgaatggcacgccttcgcacggctcgtgttgcggcgcgggccattgccccttgatcaagccttgttcggcaaggaatgcgaggatgccttcggcgtggaagatcgcctcatcacggccggtatcggcctggccacccagctccagggtggtcgccaggcacgccagcggaatctgcgcatccgggaacgcgcgtgacaaacgcagccacggcagcgaacaggcttcatcaaacgaactgccgccggagtcttccgccagcaggccgaccttcacattcaaatgcgccgacaacgaacgccactgcggccagtgctggggcagcgcgtacatatgcagcgcggcttcagcgtcgcaatgcaggtccagcaccacatcggcggtgcaggcgtggctcagcaggatgcgttgcatgccttgcaactggctgctcggctcgggcaaggcgttgagcgcatcgctcatggcctggcggatcaggcgcacattggcgtgcgggtcgtcccccaacttgccttgcagcaactcggccaccggctcgctcagctcgacaaaatcgcggttgaaattcttgccgctgccgacttcgaaacgcccctggtggctgccctgcaacaactggccgaggcccatcgggttggcgaccggcaccaactcgatcacgccattgagcgcgccttgctgttccagcgccacaaggcgttttttcagttcccaggcggcacgcatgccaggcaattcatcggcgtgcaggctggcctggatataggccttgcgctcgccgctgccgaaacgaaacacgctcagctggcgctcgcagcccaggtgcccccagggcagcagatgatcgatacgttccatatcagtgcttccgtggagccaggtagctcagccagcggcgctcggccaacttgaacaggcgtaccaggatgaaggtcaggcacaggtagaacacgccggcggtgatataggcttcgaacggcaggtaatactgggcgttcaccgtgcgcgcggcaccggtgatgtcgatcagcgtgacgatggaggccaggctggtggtctgcagcatcatgatcacttcgttgctgtactgcggcagcgcgcggcgcagggccgacggcaacaggatgcggcggtacagcttgtagcgcgacatgcccatggccttggccgcttcgatctcaccgttgggcgtggccttgaggctgccggcgatgatctcggcggtgtaggcgctggtgttgatggcaaacgccaggcacgcacagaacgtggcactggacagcagcggccacaggaagctctcgcgcaccacttcgaactgggccaggccgtagtagatcaaaaacaactgcaccagcatcggcgtgccacggattacgtaggtgtagagccaggccacgccgttgacgatcggctgcttggacacgcgcatcaagcccaggggcaaggccgcgagcaggccgaaaaacagcgagatagcgagcagtttcagggtggtcagcaagccgccaaggtacagcggcatggcctcccagatgacgttgtagtcgaagatcatagatcagccgcccttacgcctaccgagtagcgcttctcaaggtaacgcaaggccagcaacgacacgctggtgatcaccaggtacatcgccgccactgcgaggaagaaggtaaaaggctcgcgggtggcgtctgccgcctgcttggccttgaacatcatgtcttgcagacccaccaccgaaatcagcgcggtggccttggtcaataccagccagttgttggtaaaaccagggatcgccagccgaatcatctgcggcaccatcacccggaaaaacacctgaaaactgctcatgccatacgccaggccggcttcagcctgccccttgggaatggccatgaaggcgccgcggaaggtttccgagaggtaagcgccaaagatgaaacccagggtgccgataccggcggccagggggttcaagtcgatatagtcgtcaaagcccagcaacggcgcgacgcggttgagcaagtcctggccgccgtagaaaatcagcaggatcagcaccaggtcggggatcccgcggatcaccgtggagtacaggtcgcccagccaagccagccagcgtaccggcgataggcgtagcgcgaccccgatcagacccagaacaatggccaaggccatggacgacaaggcgagctgaagcgtcaaccaagcgccatcgaggataacggccccgtagcctttcaacatgattcaggtcctcgaaaagggggatgaaaaaatggcgcaaacttcaggatgactgttgcttgcgccatttcggacagacagctgcgatgagttacttggcgtcagcgccgtaaatatcgaagtcgaagtacttgtcctggattttcttgtattcgccgttggcacggattgcagcgatggccgcattgatgcgctcaaggttttctttgtcgcctttgcgcactgcgatgccgataccgtcgccgaagtatttggcttcggtgaacgatgggcctacaaacgcgtagcctttgccggcgtcggttttcaggaaaccgtcttgcagcagggtggcgtcagccacggtaccgtcgagacgaccggcggccacatccaggtagatttcgttctgggtactgtagcccttgatattcgcaccttttggcgccaggacttcacgggcgaaacggtcgtggatcgaaccgcgctgcacaccgatcgtcttgcctttgagctcatccaggccgtcgctgacgttggtgccttccttcatcaccaggcgcgccgggctcaggtagtaacgggtggtgaagtccacggatttcttgcggtcgtcagtgatggacatggacgacaggatcgcgtcgatcttacgcactttgagtgccgggatcagaccatcgaattcctgctcgacccaagtgcacttgacgtccatctgcttgcacagcgcattgccgatgtcgtagtcaaaaccgacgatgctgccatccggcgccttcgaggcaaacggagggtaagccgcttcgataccaattttcagcggcttgccttcggcgaaagcctgcatggacagcacggacagcgccagggcgcccaacagcacgagtttcttcatcttgggactccatcggtatagggcaaaaacagcagtatgagccatggcccacgatgcggcgaaggtgtaaccgaatagcgtgctgcgtcctgcgcgggcgacacctgcgacgacgagcgagtgatcggcattctaacgacaggccggaagccgatatttcctcaatgcgacaacaatttacagaagcactgagaaagcggttccagctcattgacagcccctgaattttatgcagagacaaaagatattaaacctgatgatgctgcaagttgcgggcctattattcgcaaacccttctagcacggcaagtctggcgtttaatcttatttttgggggtgtctagaatgcggtttttcggggcgtaggcgtggtccattgccccaggtttgtgcgggcggttacacatttgagcgggccggtaacattcagaaacctcctactggaaaaaccgatatttattggcttggtggatatgcaggtctgtcagaccgccatccataccctcctatgaaatgcgatcttaactgtgggagctggcttgcctgcgatagcggtgtgtcagccagccaaccgttgcctgacacaccctcatcgcaggcaagccagctcccacactgaatctgggcggtcttgaggccctacaaaaaagccccacccggcttgcgccgaatggggctctgtcccacctaccccgcttacgcgacgttcatggtcttgtgcgtttcaatcaaatgcgccaccacgctcggatctgccagggtagagatatcccccaacccatcgtattcagccgtggcgatcttgcgcaaaatgcgccgcatgattttccccgagcgcgttttcggcagccccggtgcccactggatgacatccggcgaggcaatcggcccgatttccttgcgcacccagttcttcagctccaggcgcaacgcttcattgggttcttcgccatttttcagggtgacgtacacatagatgccctgccccttgatgtcgtggggtacgcccaccactgccgcctcggcgactttcgggtgagcaaccatggcgctttcgatttcggcggtgcccatgcggtggccggacacgttcagcacgtcatccacacggccagtaatccaccagtaaccgtcctcatcgcgacgcgcaccgtcaccggtgaagtacatgccacggaaggtcttgaagtaggtgtcgacaaaacggtcatggtcgccgtacagggtacgcgcctggcctggccaggaatccagaatcaccaggttgccctcggcggcgccttcgatgatgttgcccaggttgtctaccagcgccggcaccacaccgaagaacggccgtgccgccgaacccggcttcagcgcatgggcgcccggcagcgggctcatcagcgtggcgccggtttcggtctgccaccaagtgtcgacgatcgggcaacgggattggccgacgttcttgtagtaccagtcccaggcttccgggttgatcggctcgcccaccgaaccgagcaggcgcaggctactgccgtcggcgccttcgcaggctgcggtgccggaagccatcatggcgcggatcgcggtcggtgcggtgtagagaatgttgaccttgtgcttgtcgacaatcttcgccacgcgggtgatgtccgggtagttcggcacgccctcgaacagcaccgtggtcgcgccattggccagcgggccgtagacgatgtaggtgtggccggtgacccagccaacgtcggcggtgcaccagtagatttcgcccgggcgatagtcgaatacgcgctcgtgggtcagggctgcatagagcaagtagccaccggtggtgtgctgcacgcccttaggcttgccggtggaaccggaggtataaaggatgaacagtgcttcttcggcgcccatctcttttggcgcgcagacggtgcccgccactttcatcaggtcttcgtaccagatgtcgcgatgctggttccacttgatcgcaccattggtgcgcttgcacacgatcaccttctggatgctgctggtttccgggttggtcagtgcgtcatcgacgttagctttcagcggaatcttcttaccggcacggatgccttcgtcagcggtaatcaccactttcgacttacagtcgatgatgcgaccggccaaggcttccggagagaaaccgccaaacaccaccgaatggatcgcgccaatgcgggtacaggccagcatagcgaccacggcttcggggatcatcggcatatagatagtcaccacatcgccgcgatgcacatcctggccgcgcagggcgttggcgaacttgcagacttcttcatgcagctcgcggtaggtgatgttgcggctctcggcagggtcatcgccctcccagatgatcgcgatctggtcgccacgctcggcgaggtgacggtccaggcaattgtaggaaacgttcagggtgccatcggcaaaccatttgatgtcgacatggtggtcgtcgaaagaggtttgcttgaccgcggtgaaaggcttgacccagtcaaggcgcttggcttgctcacgccagaagccatcggggttgaccaccgactgctggtacatggccttgtaggtcgcctcgtcggtgagcgtgttggctgctacttcggggcgaacggggtacagggaagccgcactcatctttcttacctcggtgacatagttgttgttgtatggcccctgttgtagccggggtgggcctatagaaccattcgacgatggtagtaacaagaccctacaaattgccctgctatgccgtttcaccgctctggcccgcgtgctgcggcgcctggcaggtttctgaaaaaatcttgatcgagggattgttacaaaaaccgccaaaagtgtttatcaaaaccacgggtatatgaatataaccgaggcgcctaaaatcaactccgccaacaaggcactctgattaacaacgcaacagcccccacgaaggcaacgttaatccgaacttcccaacttttaagtgacacacgcggcctcacaagggccccgtgccccctttcgccctgaagaaggtaatgaagcaatgaaagcgttattagtgatggccctgagcagcctgtgcgccaccgccgccctggctgacgaagccccgactgaactggccggccagaacgccccgatcgttgaggactacacctacagcacacacttggacgtggccaaagtcttgtccatgagcagcattccagaagtctgcgaagttgtaccggcgaagatggaatatgaagattcgcaaggccagcggcatattcttaactatcaagtgatgggcaatggttgctctaacggctaacaacttctgaagttggattcttaattgccgcaagaaatcgttcttgcggccaagaacccgcccttgaatacaccgcacatcaactgtgggagctggcttgcctgcgatggcgatttcagccataacacccgctacggttagtggacccaatcctcgtaagacaaccccgctacgcgactgaattcccgaatattgttggtcaccaacgtacaccccgaagcaattgcatgccctgcaatagcagtatcattttggccgatgatcgacccttgctcggtcaggcttcgcttcacctcaaccgtcgcgtccaccgccgccaggccccacggcaacacttcatcgagtcgcttcacaaactcatcgactaacgtattgtgtttgggcgatgcctttttcccaatctgcccatatcgcatttcggcataggttatggccgaaatcacgattcgattgctcctcgccacctccgatgccagtcgctcaagcacacactcgggccgctcacgcatgatgaatgagcaaatgcaggtatccagcatgtatgtcgtcacagattgaacctgccttcatcgccaataacgttctcacgctcctgaagaaaatcttcgtccgccttgggcagctcactcaacgacccccagctaggtcgtataggtcgcaacgtaatcgtatctccgttgcgggtgatttcgagctcgccgactccctcataagccatttcgtttggaattcgaatagcctggttctttccgtttttaaaaattgagactgtgcgcatgattcagctcctacctatgcctgacatatgcaatgtagagatacgtggaagcctatgcaagacatatggcaatttgccgacgatcggagatcgtgtgccagttgctaaaaaacttgcggcagtaaccccccgtaaactctcaccccggcttcaaaagcgtcctttttgtctctaatcagtgaccatccgtcacaacacaaacccgattttttccctataatgcgcgggtaaatcgggcctgcaatatccctttacactgggatgaagagccagacctgaggcatcccgcgcgagcttgcacctaccgctgcgcccctcaagcctcacgcagagcacccgtagccctattccgtttaatgcgtgcgctagctgcaacaaacgattccttaagatccaccgcggccctagggccgtgtgaacacccaaccatccggtttcacacgggcacctttgagccctcacgcaggagacgacacgtcatgctgagctgggacgaattcgacaaagaagaagaaggcgaagtagccgctaaaggcgccaacgccggccacgccaccgaagccaacatggaccgcctcgacggtgnnnnnnnnnnnnnnnnnnnnnnnnnnnnnnnnnnnnnnnngtgggatgccgagatgaaggaagaagcgacccagatgattctgcagggtacgcagctggagatcgaatacgctcgcgacaccatgcctcgtggggtgttgggcatgaatgcggcaatgatggaagattatttgaagttcatcgccaaccgtcgtttgacgcagattggcttgaaggaagagtacccaggcaccaccaatccattcccgtggatgagcgagatcatggacttgaagaaagagaaaaacttcttcgaaacccgtgtgatcgagtaccagaccggcggcgcgctgagctgggattgatccggactaagcactaaaggaagccctggcatgttcagggctttttttcgtcggtaaaaaaggaatttgccatttcttgaagtacatcacctcaagcacctggcccggaagggttcggatcgcccccccaatgctgtagccttgtgccccaattgccatcagcgttgtcacaggtcaagtgctcgggaagctcttaccgaagcgctttacgccaagatcggaagattggcacgggagcagactcctgctgtcacagctgatgcccgcttaaaaactattagataggaccgaggccaacccgtgaacccagacatgctcgaagccggccccgcagacgccaaagtactttccgtctttgacttcgacggcaccctcacccaccacgatagtttcgtgcccttcctcaagtttgccttcggcaccggtgagttttatggccggatggtcaagctggcggtgccggggctgcggtttttggtgcggcagatcagccgggatgagttgaaggcgcagttgattcgcacctttatgaccggggtgaagaagacttgggttgagcagcaagcgcaggcatattgtcaggcgcgctggagcaagctgatgcgcccgagcgggttgcagtcggtggcggatgaggtgaagtccggggcggtggtgacgctgtgttcagcgtcgccggcgttggtgttgcagccgtttgccgatcggcttggcattcgtttgatcggcactgagcttgaggtggtggatggggtgctgaccggcaagctcaccgggaataattgccgttgtgagaacaaggtgctgcggcttgaggcggtgtacggggacctgggggagtatcggctcagggcctggggcgatacgcgtggagaccgggagttgctggcggcggcgcaggatgcgcattttcggcactttcatgcgaagaaaaaaaagcgggctcggttgcagcggtgatgcgggtgggggggttggcggggagacccaggcgatcccatcgcagcctcgctggggctcgacagctcccacatttgagctttgttgaggcttaggccgacgtcttcaagtctacacccagcgctgtggcgaaggcttttaccatcgggcttctcggggcgttatggcgcaggatcaagttgaacgcggtgctcagctgtacctgctccgggcacagtgcgcgcaagcgcccttcccttaccagtggcgtggcgtagtgttctggcagaaagcccaggaagcggccagtcagaatcagaatggcgacagcttccacttgtgaggccgacgcggactggctgtcgtggttgacgaagttggccttgtcgcgatggatcgcataccgatggttcaccacttcgtattggcgaagggcatcgggggtgatgtcgctggcggtgaacagtggatgccctacggcgcagtaggcgtgggccttttcttcgtagagcgggaagtagtcgaactcttcacggcgttggtacaccgggacgatgccggcgactaggcgcccttccacgacgccgcgttcaacttcgtccaattgcgaggcatgtaggcgcaatcttatttttggcgattggcgatgtaagttgcccagggcggtaatcagtggggaattaacgtcggagacggtgttatcaataacgcccacactcaggtcgccgatgagttcattctgcgccgaactaagcttgtcgcgaaaactgtccaccgaggtgaataactcgatggacgcttgatacaccaacttgccttcttcggtcagcccgaacccttcgcggccccgtgtacacaggcgcatgccgatgcgaatctcgaggtcagagatctgtttgctgatggccgccaggcccacgttcaactcgttttgcgcagcactgaagccgccggcttcgaccacggccataaatacccgcagcaatttgaagtccaacccgctcaattgcagcggtgctcgggtgccgggttttggcggcaggtttccagaagtggaaagtggggtttccataatgcgcgttgacctcgagtgccatattcaacaggcttgaacccaatccttgaacatagccaggcggcgataatgaacataaacatccgcccttggcaaccttgaatacggcgcgtcagatgccggttctacaccgataaacttctgttgaaactgcctccgactcttctaaaaacaagcgtgaggaatacccatgtcccagcccaccgaccgcctttggggcgctcgtttcaagaccggtccgtctgcggcgttggccgcgttgtcgcgttgccctgagcgttattttcgcctgacgccctacgacctggccggttcccgtgcccatgcccgagagttgcagcgcgccggtttgctggatgagtcagaaaccctgcgcaccctcgaagccctggaccgtatcggtgaggatttcgccgccggccgcctgcatccctccctggatgacgaggacgtgcacacctttatcgaacgcgtattgaccgagcgcctgggcgcccttggcggcaagttgcgcgccgggcgctcgcgcaatgaccagacggccaacgatctgcgcctgttcctgcgtgaccatgcgcgcaccatcgccaccgaggtgttgggcttgcagcaggcgttggttgaacaggccgagcaacatgtgcagagcatctgcccaggctttacccatttgcagcaggcgcaacccattgtgttcgcccatcacttgctggctcacgcgcagtcgatgctgcgcgatgtgcagcgcctggtggattgggatgcgcgtacggcgctgtcgccattgggcgcggcagcgatggcaggttcggcgatagcacgtcagccgcagcactcggctaaggaaatgggctacaccgggccgtgtgaaaactccatcgacgctgtcgccagccgtgaccatgtggcggagttcctgtttgtagcgggcatgctcggggtgaatatttcgcggctgtcggaggagttttgcctgtggtcgtcgcgccagtttcgctgggtggtgttggacgatgcctacgccaccggcagttcgatcatgccgcagaaaaagaacccggacattgccgaactggcgcggggcaaggccgggcgtttgatcggcaacctgaccgggttgatgtcgacgctcaagtcgttgccgctgtcgtacaaccgcgatttgagtgaagacaagcacagcgtgttggatagcgtggacaccttgctgctggtgttgccggcgatggccggcatggtggcgaccatgaaggtgcaggtcgacgagctgcggcgtcaggcgccgatgggttttaccttggcgacggaggtggcggattggttggcaacgcgtggcgtgccattcaaggaagcccatgagattaccggcgcgttggtacaggcctgtgagaaacatgaaattgagttgtgggaagcctcaccggcgatgttggcggaggtggatgggcggctcaccccggacgtgcgtgattgcctgaccctggaggcggcgattgcggcgcgcagtggctggggtgggactgcgccggagcgggtgaaggagcagattgggcggttgaagattgctttggctgaacagcagaagtgggctgagagttatcaggggtttcggatttaagccggtgacgatcgttcccacgctctgcgtgggaatgcatcccgtgacgctccgcgtcgtcacgttacgcgccaacggcgggacgcggagcgtccgaggcggcgttcccacgcggagcgtgggaacgatcatgcatcaagaataattttggagtagcagcatgaaccaaaccccggcagagcgcttggaagccgagcgcaagttgtctgaaaaccagttcgatatcacgcagtacgagcatgtgccgcggcggtattacgggcggatgttttttgccacgttgatcgtgattgtgttggctgcgctgttgcgcgcgtttgccaatggccagatcgaatggtcctacattggccagttcctcacgtcgcaagccatcctctggggcctggtgaacaccatcgtcatgtcgatcctggcgatggcgctgggcgtggtgatcggggtgatcaccgcgatcatgcgcatgtcggccaacccgatcctgcgttacgtggccatcacctacacctggttgtttcgcggtacaccgctgattttgcaactgctgctgtggttcaacctggcgttgatcttcccggtgatcgcgattccgggcctgttcagcatcgacaccgtcgacctgatgacgccctttgtggccgccttgctcggcttgagcatcaaccagggcgcctataccgctgaggtggtgcgcgccggcttgctgtcggtggacaccggtcaatatgaggcggccaagtccatcggcatgccgagcctgcaagcgctgcgtaggatcattctgccgcaggccatgcgcgtgatcatcccgcccgtgggcaacgagttcatcagcatggtgaaaatgaccagcctggccagtgtgatccagtactccgagctgctgcacaacgcgcaaaacatctactacgccaacgcccgggtgatggagctgctgattgtggcgggcatctggtacctggcggtggtgactgttctttcatttggtcaaagccgcctcgagcgtcgttttgcccgcggcgccggcaagcgttcgtaagcctgggttgaggagatttgccccatgagaagcatcgtcaaggccgtcaacctgaacaagtattacgaccagtatcacgccctgcgtgacatcaatatcgaggtcgagcaaggcgaggtgatgtgcatcattggcccgtccggctcgggtaaaagtacgttgctgcgttgcgtcaaccagctggaaaaaatcgacaagggcggcctgtgggtcgatggcgaattggtcggttatcgggtggtcggcaacaagctgcacgagatgaacgaagcgcagatcgcccgccagcgcctggccaccggcatggtgttccagcgattcaatttgttcccgcacatgaccgtgttgcaaaacatcatcgaaggcccgtgccaagtgctcaagcgctcgcccaaggaagccatcgaagatgcattggaactgctggcccgcgttggcctggcagacaagcgcaatgcctacccagtggaattgtccggtggccagcaacagcgcgtggcaatcgcccgtgccttggccatgcgccccaagttgatgctgtttgacgaacccacgtcagccctcgacccggagctggtaggcgaagtgctgtcggtgatgcgcgatttggccaccaccggcatgaccatgatcgtggtcacccatgagttgggcttcgctcgcgaagtgtccaaccgcatggtgtttatggacgccggccagattgtggaagccggcagcccggaagacattctaataagcccacaaaatccacgtacccaaagctttatttctgccgttcgcacttaactaaaaaactaacgagaacgcccccatgaaaaagatgtttatcccttccttgcttgccggcctgatggcctcctcgtgtgtattggcggccttgccgcaagccatcaaggacaagggtgagatcagcgcggccatcgtgccgaactacccgccgatggacttcaaggacccggccaccaacaagctcactggttttgacttcgacctgggcaacgccctggccgagcgcctgggcgtgaagatcaagtggcaggaaaccggcttcgaacaaatgctcagcggcctgaccaccaaacgcgtcgatatcgtgctgtcgggcatgagcgacaccgccgagcgccagaaggccgtgaccttcgtcgactacttcaccagcggcccacagttgtacaccctggccaagcgcgaagagatcaaggaattgaccgacttgtgcggtaaaaaagtcggcaccagccgccgcaccacctggccgtcggaaattaccgcctggagcaaggcaaactgcgaagcggccggtaagccggcaatcgtggtgatcggcaccgaaggttcggcggatgcccgggcgcagttgcagcagaaccgcctggatgcggcgatgcagggcagcgagacgattccttatttgatggcgctggacaagggcaagtacaagccggtggggctggcgatttccaagcagttcaccgggcttgggattgagaagagcaataccgagttggtcacggcgatcagtgaagcgttgcagggcatgattgatgacgggacctacggcaagatcctgaagaagtgggatctggagcaaggtgcggtcgagaagatcagcataaacgcaggccagtaaacaccgcaaaacctgtgggagctggcttgcctgcgatagcggtagatcagccaatgacgatgcaaactggcctaccgctatcgcaggcaagccagctcccacactggttcggtgttcacatttaagttgtgttgtcgtgaaaatataacaaggacgctcgcccccaccgtggccacctactccctggtaatccgtcgcctgatgatctgctcggtgaccatcgtggtcagccgcgccatgaccagcccgttgctggccctgtggctgagcacacgcctgggcctcaaccagcaggacatcggcctgctgatggggatcgcggtgttcatcgccacgctcctggggttgtacggcggctacatcatcgaccgcctggaaaagcgcaagctgctgatcctggccatgctttcaagctccatcggttttttattgctgacctttgccagcaacctctacctcaccaccttgaccctggtcatcactgaagccgcgtcggcgttgttcctgatcggctccaaggcgatcatcagcgagaacctaccggtgggcgagcgcgccaaggtgttttccctgcgctataccctgaccaatgtgggctatgcgaccggcccgatgttgggcgtattgattgctggccaactgccgtgggcgccgttcctgattgccagtgccattgcctttggcagcctgttcctgatgatcggtattgcgccgactcaacgggacgaccgtcataaaccccagagttttctcagcaccctgcgcaccttgcgcaacgaccgcacgttgatcctgttcaccagcggcagcctgttgagcaccatagtccatgggcgctacaccctgtatctgtcgcagtttttgctagtggcctacacacccgaccaggcactgaaaattctgtcggcggtgctggcctgtaacgcgatcaccgtgattttgatgcagtaccaaatcggtcgattcctcaagcgcgagcaactgcgccattggatcgtgctgggcaccttattgtttattgccgggttggtcggcttcagccaggcgaacagtctgctgagctggtgcctggcgatgttcgtgttcaccttgggcgagatgatcatttacccctcggaatttctgtttatcgacaccattgcgccggatgcactacggggcagttactacggtgcccagaacctggccgcgtttggcggagccatgagtccggtgatttgtggctacctgctgatcaacgcggcacccaccagcatgttctttgccctggccgcacttactgccataggcggcacgctgtgtttcttgagcgggcgacgcgtggcaggttcttgctgatatttatgcaagatccggctatgaatagccaaacctctgacggacccgagccccatgaaattcgatacggcctacagcgtgagtctcgacgacaaagtgtcgatctacgacgtacgagacctgaatttcgacgaaagcaccggcttcgattccgacaaggacagcttcctgtgccccaacgacgcctgccgcgcggccttcgatagcaccaatgcgttgagcactttcaacgccaagaacgtcaactaccagcgcacgccgcacttcaagaacaaactcggcactcggcatatcgatggctgccgctatgccggcagccataaatcggcgacgggtgaaagtgatgacgagcgtgaggaaaatttcccatcggaatttgtgctgacgcggcgactgtatgagcctaaaacgccggtagtcggcaacgatgcaagcgccctgcaggaaccgacgaaagcgcctgcaaaccgcactacgacatcctctggcagtaatgacacaaccccggacaaaaccagcgtattcgcacacccggtggagtgctacgtgtccaacatcgatgacaaggacaagctcaaggcaatgcccctgaagatcggtgagcacacggcgacctactgggcattcttcaagaagatcgaatacctgcaagacaaccagggtttgatttactggggcaagatcaaggccatcaaggactacaccagcagctttcgcatcgacttcgagaagaaggtgtggctcgacaaaaagccttattcggtgaacgtctacctgagcaaaaagctcatcgaaaactaccgcaagcgcacggcattcctggagcagatcaaggcggcggccagcagtgaacggccgctgtattgctttttctatggcgtcacaccgcagcttatgcaggtgcccagtaagaaaaaccccgagcaaacgttcggggtattcagcgccaggatcgagaacctggaccacctgattattcgtgaggcgccagggctggaatcataaggggttgcaacgccaatggatgagcggtagaaacaactgtacaaaaacacagtatagttgcacctcccctgtcgaacctggagaaaccccatgtcctctctggcaatgagttctttcgtagaacaacagatcgtcctgcatcaattcaccgccaaacactgcgcgcaggcgcgcgtcatgctgggctggagccgcgaagagctggctcgccaggctggcgtggcggtgcaaacaattgagcaattggaaggccacggtgacgtggacgatgaaacccgtttgatcctggcgtttcgcctggaggccgaagggctggtgtttttcccggggttcgcaccggggtggggaatgagtgcgcgccggtttgataccccggcggcgcaaccttctgtgcaaggcctcatttctcaattgatgggttcaacagtggcaaccagcagaggctgactcaaattcagccgttggtggcctcaaccgttttatctggactggctggtgtttgcgtagaaggaatacccgggagaaaagccggtttttgaatggcctgcgaggcttgttcataaccataggcaactgccagcaaagtggcttcactgttgccgcagccatataagtaaagtgccgtgggcatgccttcctcgtccatgcctgacggaacggatatacctgggtacccggccgccgcactgtaaaaataattgtgggacagaaagttcgacaccatggcgtcgagcttgtgctcctttatggggtcatcaatggttttctgaaatacaggaagaatcgcttcccacaacgcttcgcgtttttccggggtggtctccaggtcattgatcatttccagtagtttctggtcaggctcaccagatttctgtgtgcgtttgataaaagcaaccagctcagaaagtgacttgaccggcaaaccttctcgcccagccaaatagtcctccagttgttgcttgacctccgagaacatcgcctcgttatagccctcataggcttcgtcggggacaccggcgtccaaccgctctaagggcaccagaatcgccccttgggccttcatcacttcgagcgccgcctcatagtgcttgcggtctgcaagcttggccggggccttggcctcctctgcggacaactcaggcaaaggggtgtagccaattcgcttgcccttcaaggcatcagcgtgcaggccctcggtgtagacgttggtctcggtcattgcgttaagcgcttctgccgcatcacagatattgcgggtgaaggtccccaccgcatccatgcgggtgctggtcatgacgccttcggtgctgaccaggcccgtcgtggttttcaggccaaacacaccgttgtaggctgcggggctgatgatcgatccgttggtttccagccctaacgccaccggcacatgcccctgggccaccgccaccgccgagcctgaactcgagcccgccactggccctccgagtcgatgagggttcaacgtctggccacctcgggaactccagccatcggccggtgatagtgagcgaaagttggacagctcactcatattggttttgcctacaatcaccactccggctttcagcaaattgtcgacgaccttggcgtttttagtggccggcgcgcccaccaaggcctttgagcctgcgctggtctgcatgcggtcgttggtttcaaagacatccttcagcgctatcggcacgccatgcaaatgcccgcgaacacggccatcggcacgttcctgatcgcgggctttcgcctctcgcatggcatccgggttggtttccaaaaacgcattgccgccctgtagtccacgatcaatattggcaatttgcttgagcgagtccttcaacagtgactctgaggtgacaccacctccttgggccatctccactgacatctggcaggcacttttgaaaccttgcacagggtttgaaagctcctgaagcaggcctgtcgcccatccacctgccgaaactggtccgatcatgaagtgcccctctgtttgactgagtgtgagcgctatctgccgataacgccgcaccagtctaagagccgataccccactgttatttcaggcgaatcttgtcaccgcgtcctacccttcccagcccggtgtaggcatctataccatctatggccgcagcacgcggtaagcgcgcgccagtgccgccaaacgatcacctgcccagcgcgcaccgtaaaaccagactcgggagccatcctccagggtttcacacacagaggggtatccgcctcttatggcatgatgaaaggcggcgtggggatcctccgacaccagggcatcaaggcgaagacctgccaccagttcatcgatttcacgacaggcctgctgactgtcgccactgcgctgcatgtccaccgctacccattgcacaccgacgtgacgcagggtgtcgaagacccgatgcaaagccgcgctgcgctcaaccagctcaacctgattgccctgcacatagcgctctgcatagccgatccgatagcccgtcaacgcctgcgtggcggtgaacgtggtgttattcaatactagcggtacttcgaccatcaccggttcagtagggtccacaccgctgatggcgacaagtgatagcgcggggtcacgcactggccgtatatggggcgccagggcgctataaccagggacgagcgtggcgcccgcagcctgttcggcgccaaagacaatagaagtgggggctgcatggggtggtgaagcgggcaagtcggcggcgtttattggcgcgggcagtggctgggctggggcacaaggcaaccccattctccaaagcttcttacagtggctgtccatcgaaacgtcctcccggagataaaattcccgcgggatcatcgcactctcatttggcgtttgtcgcagagctgaaatccgctgaaaaactcttttccaagcaggttttcggctcagcctgctgcgtgttcgttgaccggttgaggctccacttccagccaccacgcatgcccacgctcgggctggttcaagcgaaatgcctggcccattgccggggtagtgatcgagacattgcgctcccaggccagggccatgatgcggtcgaacggttcgtgccaggcgtggaaggccaggtcgaaggtgccattgtgaatcggcaacagccagcgccctttcagatcgatatgcgcctgcagtgtttgctccggctgcatgtgcacatgaggccactcgacattgtaagcgccggtttccatcagggtcaggtcaaacggcccgtactgctcgccgatgcgtttgaaaccgtcgaaatagccggtgtcgccgctgaagaagatacgtcgcgtgtcgtcgatcatcacccaggagcaccatagggtctggttgccatcaaacaggccgcgcccggaaaagtgctgggccggcgtgcagacaaaacgaacaccatcgacctcggtgcccttccaccactccaactggcggactttgctggcgtctacgccccatttgaccagcgtgtcgcccacgcccaggggcgccaggaagtagcgggtcttttcggccaattggaccaccgctttgcggtcgagatggtcgtaatgattgtgggaaaggatcaccgcttccagcgctggcagctcttcaaggctgatcggcggctgatgaaaacgcttggggccggcccaacgcaatggcgaggcgcgttcggcaaacaccgggtcggtgacccagaatttaccgcgcattttcagcagcacggttgaatggcccaggcgatacacgctgtgatcaggtgcggccaataactgctcgcgagtcagtggctgtaccggaatctgccccaccggccgggtggtgcgcggtttgttgaacagcatgttccagaaaatacgcagggtcttgcccaagccaccgtgttgcaccggggcgtcgttgctgaagtgccccaagtcctgctcggcaggcttgggcgccgagggcgcagggtcgagacgggttgaaatagtggccatgacgaagtgactcctgcggtccgctcaagtattacactgcacagtgtagtttctagattgcaacaaaatccggagcaagtaaactgcccggtgtaatttcattgttgagtcgaatgccttccatgactgcccccaaacgcctcaccgagcgtaaacgcgaagccatcgtggcggcggcgattgccgaatttcgcgagaacggcttcgaggtcaccagcatggacaaaatcgccgccactgcgggcgtttccaagcgcacggtgtacaaccactttcctagtaaagaagaactgttcgccgagatcctccaccagttgtgggccagcagcgttgcccaactggacgtgatctacaccagcgaccgcccgctgcgcgaccaactgcgcacgttgctggaagcgaaaatgcagatgatgtcggacgccaacttcctcgacctggcacgcgtggccattgctgccaccatccattcgccggagcgcgcgcaagacatggtcaaccgcctcagtgcgcgggaagaaggctttacccaatgggtacgcgccgctcaggaagacggccgcctcacctgcaccgaaccggcgttcgccgcccatcagatccaaagcctgctcaaggcctttgcgttctggccgcaaatcaccctcggccagcccaccctcgaccttgccgcacaggcccacgtcatcgaatcggccatcgacctgttcctcgccggttacgaagtcagcacgcagcgcccgccccagtaacccctgttgcaggcgcgacatttaaggtcgtttctggcgcttttacccgctgttttgcgcaaatggcctggaaggacactgattattcccacgcgaataatcgacaattcacctttcttatccgaccaccggctctgcccgttgacgcgtgctgttgcacccgcaaaaaaagttgacccaggacactatggaaaacagacgaggcaaagggctttcatttgccaggcgaatctacacgccaaggattatcggcctgggtatcggcagcatcagcgtgatcggggcgttgtatcccttgtcgatgcccggttgggtctgggcgttgctgttgttcaacggcattgcctggccgcacgtggcgtacctgatttccacccgctcgccgtttccctaccaggccgaacaacgcaacctgctgtatgactcattgctgggcggattctgggccgcagccactcagttttcgccactgacagcggtgaccattctgtcgatgatggccatgaacaacgtcgcagccggtggcaaacgcctgttcctgcgcgggttgctggcacaggcggccggtatcgcggtggcctggggcctgttcgacgtcaagttcgaccccagcgtcagcctcaccgaggtctacacctgcctgccgatgctgacgctctacccgatggccatcggcatggtctgttaccaattagcgatcaaactgtcggaacacaaacgcgccctcagcgccctgagccgcgtcgacagccttaccggcctgctcaaccatggttcgtggaaagacctgctgaacatcaagtttcacaagtgccagcagcaacaaggccaagcgaccattgccttgatcgatatcgaccacttcaagcacatcaatgacgtacatggccacaccgtcggtgacgcggttctgctccagttgagccaggcgctgcgcgaacacttgcgcgaagaagacctggccggccgctacggcggcgatgaattcagtgtgattctgccgaaaatgccgctgcacgccgctgcgcaggtgatggaacatctacgcgaaaccttcagcggctatcgtcatgcgcagatcccggacctgcgcgtgagcctgagcattggcctggcggatttccacccgtcgttcaaggacgcggtcatgtggctcgatgcggcggatcgcgcgttgtacaccgccaaaaacagcggccgcaaccgcgtcaagatcagcgaatgcacggccgttcattcagcctcagttgtctgatgacacctcgtccgaatcttgctccgcccacctgctgcaatagcataatgccgccattggtcgcctggccaaaatagtcctgcctgatgggcgaacttccaggccgattgatcactctgagaccgttgttccaccccctctgtcagcatcaggaagctggcaatgagcaagtcaaccgtaaggccaggggccctacggggtcaggcgcaaatacatggaccccgcatacgcttgcatgcccgagccctccaccatgctatttcacgctcacaagaaaaccatcagtaccctgcaacacagccttgcccaacagaccagcctgctggacgccatcgagcgctccatggccgtgatcgaattcgacctgcaaggcaccgtgctgcgcgccaatgacaacttcttcaagaccatgggctaccgcgccgaacagatcctgggccagccccatcggatgttctgtaccccggcgttcgcccgcagcgcggattacaaccagctgtggacacacctgcgcaacggccaattccagtcgggcacctttgaacgagtaggcgccaacggtgcctcggtgtggctggaagccagctataacccggtacgggatgaagcggggaacgtgatcaaagtggtgaaatacgccatggacgtcaccccgcgcctgcaggccgaaagtgaagccaacgccaagctcgaagccatcgaccgcgccatggcgatgatcgagttcaacctcgacggcaccatcatcaccgccaacagcaatttcctgcagcgcatgggctacagcctggcgcagattcagggcaagcatcaccgcctgttctgcacaccggagctggccaatagtgcagcctacagcgagttctggaagcgcttgaatcagggcgagctgttcaatggccagttcgagcgggtggataaacacggccaggtggtgtggctggaagccaactacaacccggtgtacgacgccagcgggcgcctgtgcaaagtggtgaagttcgcctcggacgtcaccgcccgcgtgctacagcatgccgctgacgcacagagcgccgcccaggcttatcacctgtcgttgaacacccaggagatggctgaaaaaggcgccgaggtgattcagaaaaccgccaccggcatgcgcgacattgccgtggatatcgacgcctcttcgcaactgatcgccaagctgggcgagcgctcgcaacagatcaccgccatcgtcaacaccattcgcggcatcgccgaccagaccaacctgctggccctcaacgccgccatcgaggccgcccgcgccggcgagcagggccgtggctttgccgtggtggccgatgaagtgcggcaactggcggcgcgcaccagcggctccaccgccgaaatctccggcatgatcgccatgatccaggacgaaacccgccaagccatcgacagcatggacgccacccgcgaccgcgccgcccagggtgtggaactggccaaccaggccggcacggtgatcctgcaaattcgcgaaggcaccggcgaggcggtacaggcggtgagcgcgtttgcaaacgagcgaggtaatcgctgacccattggcgctggctgtctgcaggttaacttcgcagccagcgcacatgccgccccagctcatcaaacagcgtcaccaccgagcgcaacgcccggcaatcaggccgcgtcaacaaccacagcgccgtatcgtgccctgccagcgcagggcccagcggttgcaggccatcgcccatgagaaaatccggcagtgccgccacgcccaatccagcccttaccaattcggtcaccgactgcatgctgttgcaccgataacggggacgcacgcccggcaaatgttcacgacgccagatgacggtggggtgatcgggtaaaaagtcatctggcgcgatccaggccaggttggcccagtcatggcctgggtgctggcgcacatagtcggcactggcacacacctgataggtcaccgcccccaggcagcgtccgacaagatgcgctggcggcgccttcgtcaggcgcagggcgatatccgcatcacggcggctgaggttggcgaagtcattggaggtgctcagttccagggtcaacgccgggtaggccggcatgaactgcgcgagggccggcaacagcaagccttgcaacaccgagtcggtgcaggtcaggcgcacggtaccgctgatcacttcaccgccctgctccacgccaatacgcgccgcctccagcgcctgctcggcacgctcggcttgttgtgccaggttgctcgccaggccggtgggcaaataaccggcacggcttttttcaaacagggtctggcccagcgccgcctccagccgccgcaccgcacggaacaccgtggacacatccacgcgcagcagcgcagccgcccgcgccagggtaccgccgcgcaccagggccagaatcaatgacaggtcggcgtagtcgatttgatagtgcgtggctgcattgaacatatgggcaaacgccaatactgattgcgtaagcgccaatctatagtgggtatcaacccaccacaagccatgggacgtacacgatgccaacccccgcgctgcaccttgccctgatcggtgactacaaccccgatgtgaccgcccaccaggccattcccgtggccctgcaacaggccgccgacgctctgggcctgagcgtccaagtgcaatggctggccaccgacaccctcacctgcacctctgccctgcacgattttgacggcttctggtgcgtgcccggcagcccctatcacgatatcgacggtgccctgcgggcgatacgttttgcccgcgaacaaggtcgtcctttcctcggcacctgcggcggttttcaacatgccgtgctggaatatgcccgcaacgtgctcggttgggccgatgcccagcacggcgaattaatgccggatgctgagcgcgccgtcatcacgccgctggactgctccctggtggaagtgagcgacaccgtgcgcctggccccatacacgcgcattgcccaggcctacggcagcctggatatccacgaaggataccgctgccgctacggcatcaaccccaccttcgccgacgccctgctgcaagccaacctgatccccaccggccacgattcggcgggcgatctgcgcgcggtggaactgctcgaccacccgttcttcgtcgccaccctgttccagcccgaacgcgccgcgctcaaaggcatcacgccgccgctggcgattgcgctgctcaaggcctgccaggaggtatcggtatgatcgccaagacacccgccccaccgtattacgcggtgattttcagctcgctgcgcaccgacgccgacctgggttatggcgaggccgccacacgcatgctggaactggccaggcaacaaccgggatttctaggggtggaatcggcgcgggaagatgggctggggatcactgtgtcctactggaccagcgaggcggcgatcctggcctggaaacagcaggccgagcatcggcaggtgcgcgagcaagggcgggccacttggtatgcggcgtttcacacgcgggtgtgcaaggtagagcgggcctacaccttccccacttgaaatattgccccttgtaggagctggcttgcctgcgatggccataggtatctacacaactttgtgggctgtagcagcagacggtaaccacgatgcgaagcgagccgctcttgatcttgnnnnnnnnnnnnnnnnnnnnnnnnnnnnnnnnnnnnnnnncgggcacaccgagcccaagcgaggtgccgagtggtggggcaagagccctttggttcctttgggctgggccggcattccggctcttttccaaagtgacccgccgtcaagcggaaccctaagtggccgttaccgaaggaatggatatgtacacagtccaactgtgttgactgtcaggccgccttcgcgagcaagcccgcacagttttgaccgcggggtgtcaggtagataagtgtcggctggcaggccgccatcgcaggcaagccagctcccacctttgctcgtcatcgtttgcaaaatgacggacgactaactgaccaaactacgcaacgcgctgatctgcgggatctctacccggtgcatatacacgcgtagcggctcggtgatgttgatgcgctcgtcgatattctggtcgagcaacaactgcaggcgcgctcggcacagggtcatggtgtggtcggcggccggcagccagacgaactcggccgtggggatgatgccgtcatcggccacgtccatgccgaatgagtcttcgctgaaacgcacgatgtactggtcggtcttgcggttgaggccgacaaaaccctggagttggtcggcggcctggcagataagctcggaagtgatgcgcatggtaaacctcactgaaaagttccacagggactggaaagatggtttacacgcgtggcagaaattaccgccctctgacggggcagctacccgtaagaatactgcaacgccctgcaaaaaagtccacaaaattggccggtgcgcacgttaatgtcggtttggtgatagcgccgttcgcaatcaattgttaaaaaggacaccttctcaaagttacctccacgaaaggacttcgcatatgcctgtcacgttttccaaaagcgccttgctgctggcgttgatgctcggccttggccaggcacaggctgccgagccggtcagcccggccgaattggcgacaaacgaaggcatcccctaccctgccgtgatcgctcaccgtggcgcttcctatgacgcgcctgaatccaccgccgcggcctacaaggttgcacgcgacctgggcgccgactacctggaactggacctgcaacgtagcaaggacggcgtgctgttcgccctgcacgacaacaacctgcagcgcaccaccgacgtcgccaccaagtttcccgagcgcaaagacgcacccgccaacgagttcacctggaaagagctgcaaaccctcgacgccggcagttggttcaacgccgcctacccggaccgcgcgcgccctggtttcgttggcctgaagatcctgagcctggacgacatcatcaagatcgccgaaggcaacccctcgcacaaacccggcctgtacatcgagaccaaggagcccaagcagttccccggtatcgaagccgacctgaaaaacaagctgctggacaaaggctggctgagctccgccggctccaaactgggcaagagcaacaccggtgtcggccaaggcaagggccgcgtggtgctgcaaaccttcgaaaccgcaagcctcaaagagctgcagaaggaaatgcccaacactccgaaaatcctgctgttgtgggtgggtgaaggcagcatcgagcccaaatccaaagtgaccttcgccgagtctggtgaacccaccaaggccgcctactacgccaagcaagagcctaaagacgccgccgaattcgaaaagtgggttgatgaagccaaaagcctcggcgccatcggcaccggcccgtcggctgagctgaccgaccacggcgaccagagctataccgacctggtgaagcctgaaatgaacaagctgacccacgacaagggcctgctggtgcatgtgtataccgtggatgagccggtggacttcgagaaagtcatgaaagccggcgtcgacggcatcttcaccaaccgcgccgccgaactgctgaagttctacaaacgctggccgtcgtccagcgtgcaagacctgctcaacgaccataagtactaaaagcattggtgtcagtgagccattaaggatgagttaagttgcgccggttaatctggcgccacttaaacagctcaacctaagaaggacacacaccatgaaaactttgactgccctgttcgctgccaccgccctgaccctgactgccggcctggcacaggcggatgttcgtccggatcatatcgagggcctgctcaagtccggcgccgtgatgcctttcgacaaactcaacgcagcagccgtggcaactcaccctggtgcttcgatcactgacactgagctggacaccaaacacggtgtcgccaaccagtacgtctacgaagtggacctgaccgataccaccggcaagcgctttgaagtgaagctcgacgccaagaccggtgccgtgctggaaaacaagcaagacacctgagttgaaccttgaaaaaacgcgccaccttcgggtggcgtgtttttttatgcgcgcctcaaaccgtcacataaccgtcataccgccttgcaatgattcgcctaggaacctgtgaaacgtcctacaggccctttctctgcgagtcgccatgaaccacagcatcgaccatgcccaccaggattccgatctgtttggcctgctttacggttttcgttttcgccccggcgagaaaggccagcaaattgattccgccaccgccctcgccgccttgcagcaacccccagacccggaagaattcctgtggctgcacctgaacctggcccacgccgcctgcgagcgctggatgcaggcgcacttgtcgctgccggaagagttttttgaagccctgcacgaggggtcgcgctccacgcgcatcgagcatgtggactcggccttgctggcggtggtcaacgacgtggtgttcaacttcagcagcatggtgtcgtcggatatttccacgctgtgggtgtgcgcccgcagccgcttgctggtgagtgcgcgcctgcagccgttgcactcggtggataaattgcgctcgtcggtgaaggccggtgaacactttcgctcgccgttggaactgctggtgcacctgctgcgcgaccagggcgaagtgctgacgcagatcgtgcgcaagaccagtatcagcgtcgaccatatcgaagatcagctgttgtcttcgcgcctgtccaccaaccgcgccgaactgggtgcggcccgccgcgtgctggtgcgcctgcaacgcctgctggcgctggaaccgggctcgctgctgcgcctgctcaatcgcccgccgcaatggctgcaaaaggaagacgtgaaggagttacgcaaatccaccgaggagtttgcgctgatcatcaacgacctgaccgccctgggcgagcgcatcaagctgttgcaggaagagatcgccgccaaccttaatgaacagagcaaccgcacgctgttcaccctcacggtggtgacagtgctggcgctgccgatcaacatcattgccggcttttttggcatgaatgtgggtggggtgccgctgtcccaggacccggaaggcttctggatattggtggccttggtcgcaacctttaccctgatcgccgggcgttgggcctttcgcaaattctcaaattgaaataagccccaactgtgggagctggcttgcctgcgattgcggtggatcaaccaacacaatgcaagctgactcaccgctatcgcaggcaagccagctcccacagggttatgcgtcgggtcagtgattgaagagtccagccatcgctttgagccgcttcttgtacacctgccgcgcctccaaagcctcctcgagacttaccgccacaaaccccgcccgctggttgggctgcatctgcccgatcaagtccaggtcggcgctgatcaccgtgccaatcatcgcgtagccaccgcccgacaccgcatcgcggtgcagcacaatcggttcgagccctgccggtacctgaatcgagccaatcgggtagcaactgtcgacgatgttggaaggatcggagcccgcgccaaacggctgttcccgtggctggaagctcaacgcgctgccgcccttgaagcgatagccgatgcgatcggcctcggagcccaccgtccatggctcggcaaaaaagctgcttttggcctcgtcagtcaaacgctcgtaatacagccccggcaccactcgcaatgtcacatcaccaccgaccgaacgccgcaacgccatcggcaagctgttgcccgcacgcccggtaccgctggcggtaccgatcggcaattgatcgccctcctgcaagcgccggccattaaacccgccgagggcgccgagggtgtaggtggagcgactgccgagcaccaacggcacgtcgataccacccgcaacggcgaggtaggtgcgtgcgccggccttgggaaattcgaaccgcagcacctgcccggcgcgcacggcaaaggcggtgtcctggtgcaccacttcaccgtccaggcgcggcgacatcaaggcgccgctcagggccaccagcgtgtcctgctggaactccagctctggcccgatcagcgtgcattccaggcccgccgcgcccacggggttgcccaccaagtggttggccgcactcaacgcgtattggtccagcgcccccgacggcgggatgcccaagtggtaataaccttcgcggcccaggtcctgcacggaggtggcgaggccaggtttgaggaccttgatcatgccagcgcctcctgcagggttttcggatagccgatggggtcggcgagaaaggcatccagggaaaattccaccgggcgaatgcgtaaatcgaaacgcccggcgtccacctcggcgacggcccggtcataagcctcgcggtctatcggcttgaactgcacgatatcgccagggcggaagaacaccatgtgcgccttgaggtacgccaactgctgcgccgggtcgtagatcggtgccggggtaacgccgaacatctgataaccgcccgcccctcgcactgagtagatacagccaaagcagccgccatggcccagggtcagtttcggtgtgtcggtgcgtggccgcaggtatttgggtacctgcaattgccgctcgcgttcgaccatctggaacatgaacggcaagcccgcgacaaagccgaccatcgacacaaaccacggcgcgccactgtgggcggcgatgaacgcgtttacgtcggccaagccattgatgcgtgcggcgtattccaggtctgtgccgctggggtcttggtggcggtcacgaaagcgcatcagggtttcgtgagtccaggggtcgttatagagcactgggatttcgatgatgcgcgtgcgcaaggtgcgctcggccacggcctgggcttcggcgctttgcacggcgtcgagcagcgcgtgaggggcgatgcggtcggggtcgaagcgaatctggaacgatgcattggccaggcagacatccagtacgccttccagcgccaggcgctccacggcgcgggtcaccgccatgcccttgaaaaaagcctccagggacatgctgtcgctgacctcagcaaacaggtgttcatcaccgccgaagctgtagcggatgggggacgtttcagccatgtctgttcctcttggaatcattgtagaaaggcaggcaaaaaagtaagggttggatcttattggggtgttctgacgtcgatgcccgcctggtccagggctgcacgggtggcctccaccagttccagggcgccgggggtgtcgctgtgcaggcagatggaatcgaattcaatcgccaggtcttcgccttcgacggtacgcaccaggccggcctgacaagcacgcaagacccgcgcggccacggtggcggggtccagcgcccgcacattgcgggtaaacacgatggagccgctcaggtcgtattcacggtcggcatagaactcgcgcaccaccggttgccccagttccttggcaatgcgccagatcaccgagttgggcatgcaatacagcatcagcgtgggctcgatgacttgcaggttttgcaccaacagccgggcggcctcttcatcgcgggccaggtgcatgtacagcgcgccgtgaggcttgatgtgttgcagggtcatgccttgggcacgggccatttcacgcagggcaccgagctggtagagcatgtcgtccaccagttcctgggccggtgcgttgatatgccggcgaccgaaacccaccaggtcatggaagcctgggtgcgcgccaatcgccacacccagttgcttggcgcgctcaacggtgcggcgcatggtgccggggtcgccggcgtgaaagccggtggcgatattggccgagctgatgtaggccatcagctctgcgtcgacgccgtcgccaatggtccaggggccaaagctttcgcccatgtctgaattgaaatccactgcctgcatcgaggtcgctccgccaaaggtgatgcccgcaaagtaggctggggcttgaccccttgggaagatctattatcagatggcccatcttctgaaaatcagatagctttttatcctcgacccccgatcgttcccacgctctgcgtgggaatgcagccatggacgctctgcgtccgcacttgagaccgtgacgcggagcgtcacaagaggcattcccacgcagagcgtgggaacgatcaataagcagagtgcgatatgtctttaaccttgcgccaggttcgctatttcgtcgccaccgccgagatcggccagatatcccaggcggcgattcacttgaatatttcccaatcggcggtgaccacggcgatcaaggagctggaagccatgctcggcgtgcagttgttcgtgcgctcggcccagggcatgaacctcaccgatgccgggcggcattttctcaaccgtgcctacgtgattgtgcgcagcgtggaggacgccctcaacagcccgttgccggactaccgcgccagcggcgtgctgcgggtggcggccagttacacggtgctgggttatttcctgccgcaccatttgcagcgcatggagcattggcatccggacgtgaccatcgaggtgttcgaacaggaacgccaggccatcgaacagggcctgctcgacggccagttcgacatggccgtggtgctgaccgccaacctcacccacgcggatatcgtctcggaaattctgttcaactccgaacgccgcctgtggctgcccagccatcacccgttgtgcgaacgcggcgccgtgagcctggcggacgtggcccaagaaccctacattttgctcaccgtcgatgaagccgaacacagcgccatgcgctactgggaacaggccgggcaaacgcccaaggtgcggctgcgcaccagctcagtggaggcggtgcgcagcatggttgccaacggcagcggcgtggcgatcctgtcagacctggtgcaccggccctggtccctggaaggcaaacgcatcgaaaccctgaccgtcaccgacccggtcacacccatgagcgtcggcctggcttggcaccgcgagcgtgcgtttaccccagcgatgcaagcgttccgggactacttccacgacgcgttcctggcaccgcagcagttgtcggcgcgccgctagagatgggcttgcagggtggcggccaaccaatccatgaacacccgcactcgcaatggcaaatgccgctggccggcgtacagcaacgacacatccaagggcggcgcctggtaatcgggcagcaccgccaccaactcgccgctggccaacaagtcgcgtatcccgagctgaggcacctgcgtgatgccaaacccgcccaggcacgccgactgataggcgtcggtgctgttgaccgtcacccggcctgccatcggtaaccgctgcaccttgttgcccaccaagtactcgaacccggccgagcgtgcgcccagtggccgcacgtaatgcaccaactggtgatgcgccaggtctgccaaggtttcgggcacgccataccgttgcaggtacgccgcactcgcgcagttgaccatcggcatgctgcacacccgccgcgctaccacggtttgatcgggctgggcgccgacgcgcaccacgcaatcaaaaccttcggcgatcaggtccacctggcggtccgaaccgctgatctccatgtcgatcagaggatggcgcgccatgaacgtgggcaagttcggcaagatcaagccccgcgccatgacattgggcatgtccacccgtatgcgcccggccaattgggtttcgtcctgacggaacaacccttccagctcctccatatgcgccagcagatccttgctgcgctcatacaacacccgaccatcctgggtcgcctgcaccttgcgcgtggtgcgttgcaacagccgtgcgcccagcaactcctccaacgcctgcacatgctcggataccgtagagcgcggcaagcccaggctttggccggcctgggtaaagctcgacaactcagtgacgcgtacgaaggtgcgcagcagctcaagcttgttcatgtgattgttcgccctatccggccagtgattccgatatcagcctgtttatcacgttatggccggacaaatacactcaatcccactaaccccatttgaggactgcaccatgacccgtaaaatcgcactcatcaccggcgccagtcgtggccttggaaaaagcgccgccctgcacctggctgcgcaaggcatcgacatcatcggcacttaccacagcgcagcgaccgaagcccaagccgtgatagcccaagtagaggccttgggcggtcgcgccgccatgctgcaactggacgtcagccagagtgaaaccttcgatgcattcgttggccagatcggcaccctgctcaaggatgtgttcgcccaggatcatttcaacttcctgatcaacaacgccggggttggcacctacgcaagctttgccgaaaccaccgaagcccagttcgaccaactggtggcgatccatgtgaaggcaccgtttttcctcacgcaaaaactgctgccgctgatccgcgatggcgggcgcatcatcaatatctccagcggcttggcgcgcttcagcctgccgggttatgcggcctacgcgtccatgaaaggcgcggtggaagtgttgtcgcgctactaggctaaagagctgggcccacggggtatcaccgtgaacaccctggcaccgggcgcgattgccactgacttcggcggtggcgcggtacgcgataacaatgatgtgaatgcgatggtggccaataacactgctcttggccgagccggcttgccggacgatattggcggcgcgatttcgatcttgctggccgatggcagccactggatcaccggccagcggatcgaggcgtcgggcgggatgttcctctaaacggcggccccctgtaggagcgagcttgctcgcgaaaaactcaagagcgccgcgtatttacagaggccccgcgttatcgttagcgatcttcgcgagcaagctcgctcctacagtgggtagcatttttttcgctgattttttcccgaatgacgtcgtaaccccagtggtacacgtaggtgtagggcaggaagaacaacaacacgccaatgtcgaggatgaaggcttccaacaggctgatcttcatcaaggcagcaatcaatggcaccgccagcagaatcaggccgccttcaaacagcagcgcgtgcagcacacgggtccaaccaccgttggccagttgcaggcgagctttaaggcggtcgaacaggctgttgaacaccacgttccagctcagtgccaacaggctgatgcccaaggtcactgcgcccatctccagcgccggccggccagtgacccacaccagcagtggcgtgcagatcaatagggccagcccttcgaaaccaagggcttgaaaaacgcgttcagtaagggatttggtaggggtcatgacccggctccgtgagtgacgatggttgccatgatcaggctttgtctcgatacttcataaccaataaccatcgatcaaggcgatagtcatggcctcccatgaagtgctccaggcgtttgtccaggcggccacccaaggctcgttttccgcggcggcgcgcaagctgggcaagagccagtccaccgtgagcgcggcggtggccagccttgagatcgacctggatgtggtgctgtttgaccgcagcagccgcaaaccgaccctcacgcccgcagggcaggttttgctgcaacgggctgagcaagtgctggaagccagtagccgcctggagctggcggccagtcagttatctcaaggcctggagccgaagttgagtatcgccatgtccgatacttatcagtctgatcgattcgagatcgccctcaccgccttcgaacgacgctacccggaccttgagctggaatgcctgatcgcggaatgcgaagacctgatcgcgctggtgcaaagtggccgggcgcagatcgcatttattgagaaacaggaagtttacccgcccgatctgaccttctctgcggtggaagagcgcacggagatcgcgctgttcgtctcgcctaaacacccgttggcgagcctgggcaaggttcacccgcacacgctgcaacaacaccgggagttgcgcttggcgagcatcatcagccccaatgaaaaccgcggtaagcaacgcgtctggtcggcgccgagttacctgatgctgatggaaatggcgcagctggggtttggctgggcaccgattccacgctggctggtggagcgctttggcggcaaccagttggttgaactcaaggtgcgcagttggccgcgttcggtggcggtggatgcgctgtggtcgcggcaacagccgccggggcctgcggggagctggttgctgggcaagatgctggaatgagcctgtaggagcgagcttgctcgcgaagaacgtcaacgataacgcgtgcttcctgaagaaacgcggcgtcggtgagtttttcgcgagcaagctcgctcctacaggtattaggcttacgccctcctacatttggatcgtcactgtctgggggaattgagttcggcgaggcgtcgcgtgatgaagcgtttttctggcgcttgttgggtcagggacaaagctttttcgtacgccctgcgggcttcgtcaaaccgccccaactgccggcaaaactccccacgcgccgaatgcgccaagtggtagtcctgcaaatcaccgcgctgcaaaacgttgtctaccagcgccaaccccgccaacggcccctgctccatcgccaccgctaccgcacggttcaactcgatcaccggcgacggcacagccctgagcaacacatcgtagagcccgacaatctgccgccaatcggtgtgccccgcgctgagcgcctcggcgtgtacggcggcaatcgccgcctgcaggcaatacggtccaaagcgccgcgaggtgagcgcctgctccaccagtgcgcagccttcagcgatcaaggccctgtcccaaagcgtacgatcctgcgcgtccaacagcaccagttcgccgctggcagaagtacgggcaggccgacgcgactcgtgcagcaacatcaacgccagcaagcccatgacttccggctcgggcagcaactccaacagcaagcgccccagacgaatggcctccagggtcaggtcttcacgggtgaggtcggcacccgccgaggccgaatagccctcgttgaacaccaggtaaatcacccgcagcacactgtccaaccgctcgggcaattcggcccgggacggcacttgatagggaattttcgcctcacggatcttgcccttggcgcgcacgatgcgttgggcaatggtggtgggcgtggcaagaaaagcgtgagcgatggcctcggtgctcaggtcgcagatctcgcgcagggtcagcgcaacctgggcatcggctgccaacgctgggtggcagcaggtaaacatcaggcgcaggcggtcgtcttccacgtcttcatcactccacggcgcggcctccagcgcgtcggcctgctcctccaataacggggtaaaccgcgactgccgccgcaggcggtcgatggccttgaagcggccggtggacaccagccacgcccgaggattatccggcacgccatcctcgggccagcgctgcacggcgacaaaaaacgcctcatgcagcgcctcctcggccaggtcgaaatcccccagcacgcgaatcaacgtcgcgagcacgcggcgtgattcgctgcggtaaatggcgtcgatctgcgcggtcaatcggccatgtcctcggtcaccaacttcaccaggcggtccaggctctggccccaaccgtcatgaaagcccatggcttcgtgggcctgtttgtcctcgtcactccagtgcatggcacgggcggtgtagagggtctttcccccgacctcctcaaaggtgacttcggcgctcatgaacggcttgcccgaaggcacccagcccggcatgaacgcgtcggtaaacaccaggcggttgggcgcgtcgatctccaggaatacgccctgggtcgggtattcgctgccatccggcgcgcgcatcaaggtgcggaacaagccgccgacccacaggttcatctcgcattcaggggtggtcatgccgtgggggccccaccattgttgcagcagggttggctcggtccaggcgcgaaacacccggcggcgcggcgcatcgatcaagcggctgatggacagttcaaattgagcgggttgagtgttcacggggaaacctcctcaaggcttttgattattgtgttgagagatccaattggcgcacagggcgcacttccacactgccgacccgggccgccggaatgccgcccgccacctggagcgcttcattgaggtccttggcgtcgatcaggtagaacccggcgagctgctccttggtttcggcaaacggcccatcggtgatcgacagcttgccgttgcgcatgcgcacggtggtggcggtggtcaccgactccagcggctcggcagcgagcatgcgcccgctggcctggatggactcggcgtaggccagacattccgagtcatgggggctgtcgggtgaggtgtgcaacacctgttcgtcgctgtagataaggcacaggtatttcatggcgttctccgttttcggactactgactatagttcgcggtgctcaaggtttcaggtcgaacaacgccgtgccgctgtgcatatcaaacggcgccgaccagtgctcatgcaccaccttccattggccattgatacgctggtagccggcggttacgcgcatccagcaggccttcacctcaccgtccggcccggcgccgccgcagtgggccagccaatgggcgaatgcgctgtctggcgcttcgacgacatgcagttcatgaaactcgaagatgccgggcccggggcagtgctccatgcacgcttcccagtgcgcgcggtaggccgccttgcctttgaattgcagggcggttacagcgtcgaacgagacgatatcgtcggcgtaaaagctgacaatctgatcgatatcacggctgacgacggcgtctttccattgctcgatcaggctcttgattgcagtgctcatggcgatgactccttggggtggaaaatcacggaagacacccttagtcgaatggcccgaaggaaaatcgacatccccctgaaaaataatttcccgtagcccaaacccgataaactgccccctcccttgcagccgttcggatagcccgatgcaaacccgcctcgtcgcctacgaggcgctgaatgctgtgcaacaacagcaagtcggcgccatcgaagttcaccctgaacaactgccgttttgcggtgatatgtattgcgcgctcaacactctgctcgccaagccaagccctggggtcaagggctttgcgttgttggccgatgaccttccggtggcgttcctgctgctcaagcgcccgccgtgcctgcctcattgggccgatgaacacagcgccacactccacgcgctacaggtagaccggcatcagcaggggcgtggatacggcaaggcatgtttgcaggcactgcccgccctggcgcgtgaggcgtggccgcacatcaaggggttggagctatcggtggacacccacaatcgggcggcgatggggttgtatctgggggcgggatgggtggatcgcggcgaggcgtacaagggccgggtggggtatgagcgccgtttgagcttcaggcttaatccatagcggcaatgtcacgtaaacatgacttccattcgtgcatatcctgtttacgtgacatcaggtgcagtgtcagccccgctccccgatcggcaaccagatttccaccgtgcccgtacccttcctggcatcgaaatccgcgctgtagcgctcaaaatccgcgcccatgaccttgtagcccgagtgcggcagccattcgaacatgatgcgttcgtaggtttgctcaagcgcctgcaccggcccgtagtgggggaacacggcatagttgagtggcggaatttcgatcacctcgaaattgctcggcacgtccttcttggccgggacttcaacacctgccaggtaatcgaattcgccgtgatgcgggttatggcacaccccgtaggtcacaccgccgacgcgcttcttgaggtccttgatgcaggtatcgaacaactcccacagccgtgggatatcgcccacggtggccttcgaatatcgcccttgcaccccggcgatcaccagggccttgccagcttccaggcgtagctccaacggtttttttgtctgctgatccatacgaacagtctccttcttatgagggaacaaacccgcatcgagtataggggcatatccacctcgtactccatgtagaaaaattttcgacgcatctggacaactggccatcatcgcccgtattgtctgccccgcaggccaccgcagtggccgacgtcgctcggacggttccgggcgcttacgtacctcgaggcaacaatggcagaccaaggttcgccgcgccgctttgcgcgcatagatcgactccccccctatgttttcaatatcactgccgagctgaagatggctgcgcgtcggcgcggcgaagacatcatcgacttgagcatgggtaaccctgacggcgccacgcctccccacatcgtggagaaaatggtcaccgtcgcccaacgtgacgacacccacggctactccacctccaaaggtatcccgcgcctgcgccgggcaatctcgcgctggtacaaggatcgttacgcggtggatatcgaccccgagtccgaagccatcgtgaccatcggttccaaggaaggcctggcgcacttgatgctagccaccctggaccagggcgatactgtgctggtgcccaaccccagctacccgattcatatctacggcgcagtgatcgccggcgcccaggtacgttcggtgccactgatacccggcgtggatttcttcgctgagctggagcgcgcgattcgcggctcgatccccaagccgaagatgatgatcctgggctttccgtccaaccccaccgcgcagtgcgtggaactggacttcttcgaacgggtgatcgccctggccaagcagtacgacgtactggtggtgcacgacctggcctacgccgacatcgtctacgacggctggaaagccccctcgatcatgcaagtgcccggcgccaaggacattgcggtggagtttttcaccctgtccaagagctacaacatggccggctggcgcatcggcttcatggtgggcaacccggaactggtcaacgccctggcacgcatcaagagctaccacgactacggcaccttcaccccgctgcaagtggcggcaattgcggcgctggaaggcgaccaacagtgcgtcaaagacatcgccgagcagtaccgccagcgccgcaatgtgctggtcaagggcctgcacgagctgggctggatggtggagaacccgaaagcgtcgatgtacgtctgggccaagattcccgagcaatatgccgccatgggctcgctggagtttgctaaaaaactgctattggaagcgaaggtgtgtgtgtcgccggggatcggctttggtgagtatggcgacgatcatgtgcgctttgcgctgatcgaaaaccaggaccggattcgccaggccgtgcgtgggatacgcggcatgttcagggcggatgggttggccagcaaagcctgacctgatccacctgaagaaacccaatcaatgtgggagctggcttgcctgcgatgcagacacctcggtgtttcagatgtaccgaggtgatgctatcgcaggcaagccagctcccacatttgttttgcggtgcctgttacaccaccaacgacagcaacatgatgaagatcagcgccacgatcgacagaatggtctccatcgccgtccaggtcttgaacgtctcggccacggtcatgttgaagtactgcttgaccagccagaaccccgcatcgttgacgtgagacaggatcaacgaacccgcgccggtcgccagcaccagcaactcgcggttaaccccagggatcatgcccaccaccggcaccacaatgcccgcaccggtaatggtcgcaaccgtcgctgaaccggtagcaatccgaatcaccgccgccaccagccacgccagcaggatcgggttgatctgcgcgttcaccgccatatggccgatcacgtcacccacaccgctggtgaccagcatctgcttgaagccaccaccggcaccgatgatcaggatgatcgcggcggtcggcgcaaggctggcgtcgagcaacttgaggatctgcttggagtggatgccctggcgatggccaaaggtgtacagcgacaacagcaacgccagcagcaaggcagtgatcgggtgaccgatcatgtccatccagttgcgcaccacgttgccttcggcaaaggcgatgtcggcgaaggttttgagcagcatcaggaacaccggcagcagcacggtgatcagggtgatgctgaagctcggcaggtctttgttctccggctcgcgggccagttggtccaccagttcctgggacgggttgcccgggatgtacttggcgatgaacgtaccgaagatcgggccggcgatgatggcggtcggcagagcaacgatcaggccgtacaggatggtcttgccgatatcggcgccgaacacgccgatggctagcagcgggcctggatgcggtggcaccaggccgtgcactgccgacagaccggccagcagcgggatgccgatcttgatcagcgatacaccggtacgccgggcgacgataaacaccagcgggatcagcaacacaaagccgatctcgaagaacagcgggatgcccaccaggaacgcggcgaacatcatggcccactggaccttttccttgccgaaggcgcggatcagggtctgggcgatctgatcggcaccgccagactcggccatcatcttgccgagcatcgtgcccagcgcgaggatgatgccgacaaagccgagcaccccgccgaaaccgtcctggaacgccttgatgatcttgtccacgggcatgcccgaggtcaggccgaggaaaccggccgcgatgatcagtgcaatgaacgggtgcaccttgaacttggtgatcagtacgatcaacccgatgatagtgactactgcatctagcagcaggtaagactcgtgggacatgccaaacatggggggtctctcctgtttgttgttgttattaaagcgggtgttgaacttcctgccggggatagcgctatcttttccggcaaaaaattaatgagtaggttcaaagccgtgcttgtgccaccaggtattggtctgctcggccagttcctcgacgctgtcttcactggcgttgagcgccagggtcagcggctcgcccttgggcgattcaagggtggcgaactggctgtcgatcaggctggccggcatgaaatggccggggcggtgagacacgcggtcggcggcgacttcgcgggtcagctccaggaagacaaaacccaggcccggcgcggcttcgcgcaggtggtcacggtattttttcttcagggccgaacaggtcagtacgggatgctcgccggccttcaacgcacggcgcagttcatcgcacaggatgtcgagccagccggcgcggtcgtcgtcgttgagggggtggccggcgctcatcttttcgatgttcgcggcggggtgaaagctgtcgccttcaatggcagtggcgccgttgagggcgcacagggcttggctgacgctggacttgccacagccggaaacacccatgatgaccagggcggtaacaggttgactcatgaaacacctcaggacgcagatagcgctacctttgcatagcgtaaggctagtgcaaaaacaggcttttcccgcgccgacttgtcatttttatggagtgacgcgtgcatccgctccaatcattcgaaccggatcaggcaaccctaggttcaataatttgcagccctttggagacagcgctaccttagtgcctcgatttttgtttggcaagccgcctgatgacctccaagaacgataaaaatacccgcacaacgggccgccctaccctcaatgaagtggcgcgccttgctggcgtcagcccgatcaccgcctcccgcgccctgcgcggcatcagcacggtggccaccgaactggtggaaaaagtgcaacaggccgccgccgaactgagctacgtggtcaaccccgccgcccgcgccctggcctcggcgcaaagccattcggtggtggtactggtgccgtcactctccaacctgctgtttatcgaaaccctggaagccatccatcaggtactgcggcccaagggctttgaagtactgatcggcaactcccattattcgcgcgatgaagaagaagacctgctgcgcaactacatggcctaccagccacggggtttgttgctgaccggctttgaccgcaccgaaagcgcgcgacgaatggtcgaggccagcaatgtgccctgcgtgtacatgatggatctggaccccaatgcaggggtgaactgcgtgggcttctcgcaactggccgcgggcgagaccgcggccgcgcacttgctgtcccggggtcgcaagcgcctggcctatatcggcgcccaactggaccaacgcaccttgctgcgtggcgaaggctttcgccgcgccttgcaacaggccggcctgtacgacccggcgctggaattgctgacgccacgcccgtcctccgtgggcctgggtggcgaactgtttttgcaactgctggccgcccacccggaggtggacgcgatctttttcggcaacgacgacctggcccagggcgccctgctcgaagccctgcgccacggcatcaaggtgccggaacgtgtagccgtgctgggtttcaacgacctgcccgcctcgtccttcatggtgccgcgcctgagcagcatcagcacgccacgggaagccatcgggcgccgagcggcggagcatctgctgacgatcatggcgggcaacaaggtggccaagccggtggtggatatggggtttgagttgcaggtgcgcgagagcacctgagcgtcgagccgaacacaatcaatgtggtgaccacagaatcagcgcctggcacagatcccctgtgggagcgggcttgctcgcgaaggcggtgggtcaatcaataaatttttaactgaaccacctgaaactcagatttcctacgtaatcgtgtaagagcagtcagagcgctgtgggacgcctgtaggaagtgcctgacattgcagtaagcgccttgctccgctgcctacgcttacgtcagaatccgccggcttgtgcgcctcggtggcggtctctaaggtttgacggtcgctgaatttctcggtgatcgggtttagtagcccgagttcggtcactctaagtgcataagtctgcccgcgttaatggcggctgtgcgtagggcactttcgggtgcgccggctttgagtgtccaccggtctactaacctgcgtacagttgccaccctcgtttagtagcgatacggcggcagcccattccaggatgctctaatgatcaaacaaatcgatacgccgccaaccaccctcttcaccctcatccccgatatctccaccgaaaccctactggccaacagctacgaaaccgtctgctccgtcagtaccctcctgctcgacctgtccgatgaccttaccggcaaacatcgcgatatagccctggccattcatcaattgagcgaactgagcgtattgctggtgggcaaggccatggaccagcacacaccacgctgctgaggcaaaacgcgatccctgtgggagctggcttgcctgcgatagccataggtatctacacaactttgtgggttgtaacagcagacggtaaccacgatgcgaagcgagnnnnnnnnnnnnnnnnnnnnnnnnnnnnnnnnnnnnnnnnaccgagcctaagcgaggtgccgagtggtggggcaagagcgttttgcttacttttgcgctttttttcaaaagtgagccgccgttgggcggaaccctaagtggccgttacctaaataatggatatgtacgcggtcgaatccaacatcctggtcggccgtcaggccgtcttcgcaggcaagccagctcccacatttggatcgcggtgcgtcagttagaacagcgtcggctatccggtcgtcacgggagcaagcgccctcgccacaggtccagcgtcgcaccaaagttgtgtagatacctatgctgcgatagcggtgtatcaggcaacatcttcattgactgacacaacgctatcccaggcaagccagctcccacattttcgacagtgcccgcttcacaccctcgcggccgtgcccggctcctgttagattggtcattctccaaatgccagggaagcaccatgggccattcactgaaaatcctgggccgtacctcctccatcaacgtgcgcaaagtactgtggacctgccaggaactgggcatcgactatgtgcgcgaagactggggcatcggtttcaagcctacccaatcccccgatttcctcgccttgaaccccaacgcgcaggtgcctgtactgatcgacgaccatggcgtgctatgggagtccaataccatctgtcgctaccttgtcggcctctatcagcgccatgacttgctacccgttgagcctgccttgcgtgcacgggtcgaacagtggatggactggcaagccaccgaactcaacccttcgtggggctatgcgttccacgcactggtgcgtcaaaacccggactatcaggacccgcaacgcatccaggcgggtgtgcaggcctggaacgacaagatggccttgctggaacaacagttgagcaagaccggcgcctacgtcgccggccaagagttcaccctcgctgacatcttgatcggcctttcggtacatcggtggcagatgacacccatggagcggccaccctaccccgccatcgcggcgtattaccaacgcctcagccagcacgctggcttcaagacgttcgcgctcgacggccacaattagagaagcagttgcgcgctttaagctccaagcccaatagcgctttggcttaaagctcgaagcttccaactcgcctaactcaaggttattcatgcccacactcgccgcctgcgtctcagaccccacccgcgccgcccacatcagcgcccgcatcgaccgcctgcccgccgtcgccactatttggcgcctggtggcgttactctccatcggcggttttttcgagctgtatgacctgttccaaaccgcctatatcagccctggcctgatcagcgacgggatttttcataccggcagcgaaggtgttttcggcttctcggaccaagccgctttcgcctcggccacgttcctgggcctgttcctcggcgccagcctgctcagccccatcgccgaccgcttcgggcgccgggcgattttcacctttgcactggtctggtacacggtggccacggtgctgatgggcatccagacctcggccgtgggcatcatctgcatgcgttttctggtgggcattggccttggcatcgaactggtgaccatcgacgcctacctttcggaactggtgcccaagcgcatgcgcagttcggcgtttgcctttgcgttttttatccagtttctgtccgtaccggccgtggcgttgatgtcgtggtggctggtgccacaggcgccgttcggtatcgccgggtggcgctgggtggtgttgagcagtgcagtgtttgcattgtttatctggcaactgcgcaagcgcctgccggagtcaccgcgctggcttgcacaaaagggacgcttcgaagaagccgacacgatcctgaacaacctggaggcacgctgccaaaaggatcacggcaagccgctggacatgccggagcccgaaacgatcagcgtgcaaggcagtggccgtttcgccgatatctggcagccgccctaccgccgccgcgccttgatgctgatcgtgtttcatgtattccaggccatcggcttcttcggctttggcaactggctgccggccttgctctcgggccagggggtcagcgtgacccacagcctgctctacgccttcatcatcaccctcgcctacccgctgggcccgctgttgttcgtcaaagtggccaaccgctttgagaacaaatggcagattgtcggctcggccatgggggcggtgatcttcggcagcctgtttgccctgcaaaccaccgcgttagggctgattttctgcggggtgatgatcaccttctgcaacgcctggctgagcttcagttatcactcctaccagagcgaattgttccccaccaatatccgtgcacgggcggtggggttctgttattcgttcagccgtttatccacggtgttcagcagtttgttgatcggttttatcctcgaacacctgggcacgccgggtgtgttggcgtttatcgccagcagcatgttgatcgtgatgattaccatcagttggttcgggccacgcacgcgcaacctggcgctggagaacatcgctcactgacggcaacggttggccgcacaaggagaaggcttgccacgccgacgacttccgccccagtaaacactggggtctggcacccggcacagtatttgctccagctgtcgcaccgtctgttttcataggtgaccgatcatgctggttaacaacactcaagcggcgtcgaacgtgcaacagatcacgcgacccgacatggaccccgccaacgccgccgccagtgcgctgtacagcggcgctttgcaggctgcgcaacacagcgtcacagtgccggccgcgcagagggaattggacaaggccagcgatcgcatcgacgaagccttcgccaagacccgcgtgcagttacaggccacgactaacggggcacgtaccgagttcaccgaatacatgagcaaatccccggccgaacgtattcgtgaacagttgctcaaggaacaagggctgaccgaagagcaagtgcaggcgctgccccaggaaaaacaagacgccatcgccaaacaagtggccgagcgcttgaaggagcaacaacagcagcaggtagcggcgaaggccacggcttcgccaacccagacactgaaggaaaccctggccgctatctaaacaggtgggagctggcttgcctgcgatagcatcacctcagcccaactgatacaccgaggtgtctgcatcgcaggcaagccagctcccacattgttcggtttagcggtctgactcaatgggcttgaagaccacctgctgcacatcgacctttttcgggatcaggccgttggcaaaaaacaggtcggcggtgcgttgctggttggcgatgtcgatggccgccaaggggcggatcggttcaggcgagcgatgttcgaagtagcttttgaccaccgccgatggcagccctagggtgccggccatcagcgcgatgctcgcgtcgggctgatccagcgacaggcgctgtgctttaccaagcgtctggataatcgtggcgatggcctcggggtgctgcttggcaaacgggtggttgaccacgaagaaactgcccgcagggttcagcccttgcccatcccccagcacgcgcgccgagccgtcgatcacagcggccgagtagtacgggtcccacaccacccaggcgtccaccttgccttgttcaaacgcggcacggccgtcggaaggcgacaggtacaccacgttcacatccttccactgcaacccggcgcgcagcaggctcttgagaaacaggttgtgcgcactggagcccttgagcaacgccacgcgcttgcccttgagttcagccacggtctgcaccgtactggccttgggcaccagcaccgcttcggccttgccctcattaggctcgacggcgaagtattgcaagtctatcccggccgcctgggcgaagatcggcgggatgtcgccaatattgccgatgtccaggctgccggcgttaagcgcttcgatcagcggcgggccgccgagaaattcggtccactgcacctgtgtaccgggcagcgccgcttcgaagagtttgtgctcacgggcgagcaccatgctgaccgagcttttctggtagccgatgcgcagcgtggaaggttcggccgctgaggtgggctgcgccaataccgccaatgccagcagcgaactgcccagcaggtgtttgattgctttcataagttgcctcttggtggttcgatcagattcaaagtgagcacagtaagcgtggaagctggcgtgcctgcgatggcggcctgtcagggtcagaggtgttggctggctcaccgctatcgcaggcaagccagctcccacatttgatcggtgtgggattcaaggccggtaacagcgcgggccatatagtcactgaccgagcgctgggaaatccccagttcggcggcgatctgggggtacgtcaggccgttgacgcgggacaacaggaacgtcgtcttgatcttggccggcaagcggtcgagtaatagatcgatggcttgcagggcttcgagtacctgggcccgatcctcggcgcaggcggcatcgtcatccagcgcagcgaggtaggcacgctccaggtcacgccggcgccacacctggtatacgaggcgctgggcaatggtggtaagcaatgcgcggggctgtcgtatcggcgttagctgaggcgcactcaggagctggacaaaggcgtcgacggcgatgtcttcggcgtgggcacgggagttgaggtagcggtgcaagcggctgcacagccaagggtaatgaatgcgaaacagtgagcccacgtaatcgctgtgagcactatcggcgccggacatagtggctccttctgagtaggttgcgcggtatgtccggtgttccggtggagcgatcctagcaaggctgcttatgctttaataatatttaaaatgcatttttatataactctattgaagtttcgggtagccggcgctggcggcctgccgttggtaatccaacaccacctgatagtcgtcttcgctggcagggagcacggtttgcacacccaaggtttgcgtcacctgcggcaggtcctgcaacgccaggttcatcgcctcccgaatctgcgccacctgcacgtcgctcaagcccagcgcgcctatgtagggcaaagtcgggctcggcgcgctgcgggtgatgacgcgcaggcccgccacctcttcgggggcgaatcgggcgaggtagtcgtaggtgacgctgtcgatggcagcgaggtcggcgcggtcttcacgcagccagcgcaagctctcgcggtgggcgccgctgatgccgacgctggcgaagaaccgcccgtcgtgctgcaacggcgccacgcagtgacgcagcaggttcatgccgctgttggagtcgtgaccgttgatcacgccgcggctctggtagaactgcgccaggcggttacgcgggttgtcagcgcgggtcaacagcaggctgcaatgttcgccgtggctgctgtggaccaactcgtaacgggggcgcccaatgatgcgtacctggccgcgcaattgggtcatcagcgggtagccgcaggtttggctgacgagcaattgcggcgaaagccacaggccgggcaagtcgaggtggtcggcgtcaagacgatgcagcttcaagcgctcaaggatgcgcgccagccagcgttgattggcctgctggatgggctggggcgcaacgtacatgcgcaggtcggcgtaatgctcactcatggtcgcctctcaggcaaacgggtgccgggggctgtcgatggccttgaggccgtggcggctgatcaactggccgtaaccctgcaccaggaaaccgccgctgcgcgccagccactgctcgcgccgggcacggtacaccctgggcagcaggtaccacggcaactttggcagatcgtggtgtaccagatgcagattgttgttgagaaacagccaggcccaaggccaagacgcttcgttaagcactgtgcgctgttccggccggagatgggggcggtgctcatagtaggaacggatcgaggccagggacaaggctggcacgctgaccagcagcaggtaatgccacaccgcaagcgcgctgtagtaggcgatgaaaatcagcatcagcacagtgacggcgccgtgggccagccacatcggccatacctgaggcagacgttgaaattcgtgacgtgccaaccggccaatcgccaacggcgctgccagcaggaagcggccaagcacggtcttggtcagccaatgcaggccacgttcgaacagcgagctgttgttccattgctgctgattgaggtagcggctttccgggtcgatgcccggtagggtcaggtcgtggtcgttatggtgcaacaggtggctgtcgcggtacagcgtgtagggataccacaccgcgaacggggcatagccgaggagtttattcagccataacgaacgagtcgggtggccgtggagcaattcgtgctgcaccgatagccacagggtcaccagcggaatcagcagcaacatgctcagccacaggcccagccaccagctgccaaggatcaccgcgaaccagccggcatatacgctgatcaacagcagccaggtcggccactcggttcttgccacaaaggtcgtcgccagggcttcgatttcccggcggtgggtcggatcaaggtaattggccatcggcagctcagagcaggtgtttcctgctctgtgcaatgaggcgggaaaatcttgcagatcgtttggttctaagcttacaactcagtgaccgaacaggcctgcttcggattttttggtcttcttgtccgcgcgtttttcatccgcggtctttgccggttttttcttcgcggctttctttgaatccatacctttggccatgatgcatgctccactaacaggggatgtagcactgggtataccacctattgcccggcagaaggcgcttataatcccctgccctggataacgcttgtctgaaccccatgcccccattgcacatcgaaccgctggccgagcctctgtggccactgctgaacaagttttaccgcagccacaattcatcgatgaaggcgctcaagggcggccgtttgtgggtagtgcgagatggcgagatcgtggccggcttgtgcttgagcccggtggtgggcgggcagtggctgacgggggtgtttgtggcgccgactcatcgtggccaggggctggcggctcgattgatcggcgaggccgtggcgggtattgaggggacggtttggttgctgtgccatccggacctggaacggttgtatcagaggatggggttcagccaggacacggttttgccgcaatcgctgagtgaacggctggtgcgttacaagcgcaataagccgatgattgcgatggggctcaatgcccaggataaacactgaacccatgtgggagctggcttgcctgccatggcggtgggccagccaatctatctgtgacagatacaccgctatcgcaggcaagccagctcccacagttgaactgtgggtgtgtcagaagggctattcgtcagccgttgggtccagctccgggaacatcacttcaataaacccgaatttgctgaaatcggtaatccgcgacgggtacagccggccgatcaaatggtcgcactcatgctgcaccacccgcgcatggaaaccgtcggcaaagcgtacgatcggctcgcctttggggtcgaacccttcgtagcgaatctgctggtaacggttcacggcgccgcgcaggcctggcaccgacaggcaaccttcatagccctcttccagtaccgggctgagcggtgtgatcagcgggttgatcaggatggtctgcggcaccggcggcgcgtccgggtagcgttcgctggcttcgaaaccgaagatcaccagttgcaggtccaccccaatctgcggcgcggccaggccaacgccgcccacgtgctccatggtctggaacatatcgtcgatcagttgccacagctccgggctgtcgaacatttccggcggtaccggcggggcgatacgcagcaggcgctcgtcgcccattttcaggatttcacggatcattgttcaggctcggtcatgggcttggagtggtcccggcctaggccagagacgtgttgtttttcatcggtgtggcccggctcgcctatttctttctcaccggggtccttgccctcggcagacatatgctcgatgaccgcgttcatctccgcgcccagcagcaatacggcggcagagatgtagaaatacaggagcaagacaatgatcgcgccgatgctgccatacatggcgttgtagtccgcgaaggtcttgacgtagtagccaaagcccagggaggcgacgatccataccaccacggccaagacggagccgggggtgataaagcgaaactcctgctcaacgtccggcatcacgtaatacatgagggccacggcgaacatcagcaagatcacaatcagcggccagcgcaggatggtccacagcgtgaccacgaattcctgcatgccgatctgcccggccagccactccatgacctgtgggcccagcaccatcagcgcggcggcggccagcagcatgccagcgatgcccacggtgtagaaaatcgacagtgggaaacgcttccagatcggccgcccttccaccacgtcgtaggcggcgttcatggcgctcatcatcaggcgcacgcccgcagaggccgtccacagtgcgatgacgatacccaccgagagcaagccgcccttggactgctgcaactgatcgatcaccgggttgacctgttccagcgcctggggaggcaacaccaactccgattgcaggcgcagccaggtgaagaagtcaggcaggtgcaggaaaccgatcagggcaatgagaaacagcaggaacggaaacaaagagaacagcatctggtaggccagtgccgaggcgtaggtaggcatctcgtcatcgacgaattccttgacggtgcgtaccagcaccttgtgcagcttgagaccatcgagtaccggaaaaagcatagcgtctcctttcgccgcaaagaggttgagttcgtgggcgactcaggggccgttttctacatcaaagtagcccatttggcgactttgaaacaatttcgaaagtttagttgcaccttcagatacaaaaacggccatccgtggatggccgtcgggctgctgggggctgcccgccaggacgtgttactcagtggcttttttcactgcgtccttggtcttgcccactgcttgctgcgcttcgccttttttctcttggatcacaccttcagcacgcagtttgtcgttgtctgtgactttaccgacgccttgcttgatgttacccacagcttcgttcgccaagccctttaccttatcggaagtgctgctcatggtattactcctgataacaatcaaatggtttttggtcactacgtagcggttgacctgaagcgcaacggcagagtttcaattatttttgcgcaagcatttcatcgaaagcggcaggtttggctttatgttttgcagccaacccacgagaatgcccggcacattcaggctgcaacgctgaataacagatcccgtaggaaggttatgaaactcaataaagcacaggccattgcccgcagaaaccaggaactgggcggtgccgtactcggcgtcaacaactgccacttcaccgacctggaccgcaaacgcaacatctggtggttcgacctgccggtggggcgcattgccgtgggccagtacgagtggatccacctgttgatgcacaacgccgacaccgaccagttgctgcacctgaaggtgccgaccgtgttcctgcgtgaaaaactcgaagggctggtggtacgcaatgcgggcaagcgcaagccggagattaccctggagttgagtgccgataaggattcgttcttgaaggacgtacgccccgccggtgcgggtgtgagcttcgcgcagttcgtgctgtaaccccggtaaccctgtgggagcgggcttgcccgcgatagcagtgagtcaggcgatacagcagtagccggtgtagcgctatcgcaggcaagccagctcccacagggggtaagtgtttcgccagcgcccccataaaaaaccccgcatcagcggggttttttatgggttactttttaagaccgagtttcttcagctcttcatcccgcaattcacgccgcaagatcttgcccacgttggtagtcggcaacgcatcacggaactccacggccttgggcaccttgtagccggtgacgttggcacgcatgtgttccatcacctggtccttggtcagggtagcccctggcttgaccacgatgaacaacttgatgtgctcaccggatttttcatccggtacgccgatggccgcacactgcagcacgcccggcaggcccgccagcacgtcttccagctcgttggggtagacgttgaaaccggagaccagaatcatgtccttcttgcggtcgacgatacgcatgtagccgtctggctggatgatcgcgatgtcgccggttttcagccagccttcgctgtcgagcatctcgtcggtggcgtcctggcgctgccagtagcccttcatcacttgcggacctttcacacacagctcgccggtttcacccagtgcaagctcggtgccgtcgtcagcgatgactttacacgcggtggaaggcaccggaatgccaatggtgccgatctggatgtgctggatcgggttgaccgtggccaccgggctggtttcggtcatgccgtagccttcgcagatcgcgcagccggtcaccgccttccaacgctccgccgctgccagttgcaacgccatgccccccgacagggtgaccttcagcgcagagaagtccagcttgcggaaaccttcgttgttgcacagcgccacaaacagggtgttgaggccgacgaagccgctgaacttccacttcgacagttccttgaccatcgccggcaggtcgcgcgggttgctgatcaggatgttgtggttgccgatcagcatcatcgccatgcaatgaaaggtgaaggcatagatgtggtacagcggcagcggcgtgatcaggatctcgcagccttcgttgaggttggagcccatcagcgccttgcattgcagcatgttggccacgagattgcggtgggtcagcatcgcgcccttggccacgccggtggtaccgccggtgtattgcagcacggccacatcgccgctggccgggctggcatcgtcgaccggctggccatggcccttggcgagcacgtcgttgaacttgatggcctgaggcaagtgataggccgggaccattttcttcacgtacttgatcacgctgttgatcagcacgcgcttgaacggcgagagcaggtcggcaacttcggtgacgatcacgtgcttgacggcggtcttgggcacgactttttcagccaggtgcgccatgttggccaggcaaaccagggccttggcccccgaatcattgaattggtgctccatctcccgcgcggtgtacagcgggttggtgttgaccacgatgaggccggcgcggatcgcaccgaatacagcgacggggtattgcagaacgttgggcagttgcacggcgattcgatcgccaggcttcaagtcggtatgctgttgcagatacgcggcaaatgcgccggacaattcgtacaattcaccgtaggtgatggtcttgcccagattgctgaaagccggtttgttagcgaagcgctggcaggactgcttcagtaccgcctgaatattcggatactcgtctggattgatctgtgcagcaatcccggcggggtacttatccttccaaaagtcttcattcatggaagcccactcctcagcgacgcgaattcatcatcgcatttgatgcgattattattggtgtatgtttttaggtgagtctggcgctttaaagcaggcctagaagtcacaaagcgcgccgagagtagcagctttgccaagggccgcctagagccaaaagagggccctacagtcataaacatgactcaagaatatccaatggtcacttttagagcaaaaattctataactccagaaatggctctagaacaggctttcaagggcgaaaaatacagtgtgggagctggcttgcctgcgacagcggtggaccagtcaattcaacaggtgactgaaacactgctatcgcaggcagaccagctcccacattttttgtacccggtttcaattcaagcgatgtcgcgcagctcccggcgcagaattttccccaccggcgtcatcggcaacgactccctcaacacaatatgcttgggcaccttgtacccggtgaagttggccttgcagtacgccttcagctcctcaaggctcaccccctgggcccgtgccaccacgaacagcttcaccgcctcccctgtgcgctcgtccggcacgccgatcacggcgcagttggccacggccgggtgggccatgatcacgtcttcgatttcgttggggtacacgttgaaacccgagacgatgatcaaatccttcttgcgatccacaatgctgatgtagccatcggtgtcgatcaccgcaatgtcgccagtcttcaaccagccatcggcgtccagggtttcggcggtggcggccggttgctgccagtagcccttcattacttgtgggccctggatgcacagctcgccgcgctcgcccaacggcagttcttgccccaggtcatccacgactttcatcgccgtccccggcactgggatgcccacggtacccaggcgcgatagcccgccgtaggggttggtactggctaccggcgaggtttcggtgaggccgtagccttcgccgatggcgcagccggtcagcgccttccagcgttccgccgtggccttgaccagggcggtgccgccggaattggtgatcttcaggtgggagaaatccagggtcttgaaatccgggtggtccatcagcgccacaaacagtgtgttcagccccaacagaccggagaactgccactgcttgagctccttgataaacccgccgatgtcccgtgggttggtgatcagcacgttgtggttgccggagaccatcatgcacatgcaattggccgtgaaggcatagatgtggtacagcggcagcggtgcaatcattacctcctgcccttccttgatcagcggatggccgtcgtcgcccagttgcgacatgcaggcccgcacctgctgcatattcgccaccaggttgccgtgggtgagcatcgcgcccttggccagcccagtggtgccgccggtgtattgcagcacggcgacgtcgtccagggtcaccggatggcgcgtcactccaaggcccgcgcccatgcgcagggcgcgcttgaacgacaccgcccgcggcaggtagtaggccgggaccatcttcttgactttgtcgaccacggtgttgaccagccagcctttggcggctggcatgaagtcgcccatcctggcttcgatcaggtagtcgatttcggtgtcggtgcacacctcctgcacccgcgagccgaacaggttgaggtagaccagcgcccgcacaccggcatccttgaactggtggcgcatctcgcgcggggtatacagcgggttggtgttgaccacgatcagcccggcgcgcagtgcgccgaacaccgcaaccgggtaatgcagcacgttgggcagctgcaccgcgatgcgctcaccgggcttgaggtcggtgtgctgctgcaggtaaccggcaaacgccgcactctggcgttcaagctcggcgtaggtgagggtaatgcccatgctgctgaatgccggacggtcggcaaaggtcttgcaggaacgctcgaagacctcgatcaccgacttgtaggtgctgaggtcgatggcattggggactcccgccgcgcgtttgtcattccagaaatcaggttgcattattcttgtcctctttacctgagtgtgtccggccgctgccatgcaaatgcgcagcaataagaagcggagctttggggaagttagcagctatggccaaacaggcaagacactgaactgtgtcattgattgtatgaatcttgtacctaaggcgtaggcagataccccgccccacgccggatgagctatacaatgcaaccaccctgagcaaaggaagccgccatgaaccacagcaccttctggctgaccgcgaacgaccacacccgcctgtacgtcaaccaatggatgcccgacggctcgcccaaggccgtggtgatgatttcccatggcatggccgagcacggcggccgctatgcacgcctggcgcaggcattgtgtgcagcaggcctgggtgtgtatgcgctggaccagcgtgggcatggccgtaccgccgaggccggcaccgttgggttgtatgctgaaacggacggctggaacaaagtggtgggcgatctggccagcctcaatcagcacattggccaacagcaccccgggctgccgatcatcctgctgggccacagcatgggcagctacatctcccaggcgtacttgctgcatcacagtgccagcctgcatggggcaattctcagcggttcgaatttccagccggtggccctctaccgtgcagcgcaaatcattgcgcgcatcgagcgagcacgccaaggcctgcgaggacgcagtgcgttgatcgacttcttgtcgttcggctcattcaacaaagccttcaaacccaatcgcacccagttcgactggctcagccgcgacccggttgaagtggacaactacatcaacgacccactctgtggctttcgttgcaccaatcaattgtggatcgacctgttgggcggcttgcagcagatcagcaaagtctccaacctggcgcagatcgaccccggcctgccgatcctggtgatgggcggcgattgtgatccggtgagtgaaggcaagcgtctcaaggatctggcccatgccctgcgtgaggccggttgccaggacgtgcaattgacgctctacccgcaggcgcgtcatgaagtgttcaacgaaaccaaccgggatgaagtcaccgccgacctgctggcctggctcgaccaggcgctggcgttgcgcaggcccacccgctgcgaatagtttttgctttaaaatcagccgattaattaccgttaagccacaggatgcaccttgagatgacccaggtaaccaacaccccgtacgaagcgcttgaagtgggccagactgccagcttcagcaaaaccgtcgaagagcgcgatatccagctgttcgccgccatgtcgggtgaccacaacccggtgcacctggacgctgaatacgccaaggcgaccatgttcaaggagcgcatcgcccacggcatgttcagcggtgcgctgatcagcgcggcggtggcctgcgagctgcctgggccgggcacgatttatatcggccagcagatgaccttccagaagccggtgaagattggcgacaccctgaccgtgcgtttggaaatcctcgagaaactaccgaagtttcgcgtgcgcattgccactcgggtgttcaaccagcgtgatgagttggtggtggatggcgaggcggagattctggcgccacgtaagcagcaagtcgtgaccctgaccgaattgccacccatcagcatcggctgacctagattccagcctgtgcataaaacacatgtgggagcgggcttgcccgcgaatgcagtgtgtcagtcaatacaaccgtgactgatccaccgctttcgcgggcaagcccgctcccacactaagcccagcgtggggcttacgactgagcgcgagcctggttacgcagggcttttacctggtcgtggttgcgctgtaccccgtggtactgacgctcaaccaagtcacgaatgcccaccaggttgtgcttgttgatcttctcgatggcttccttgtaagccttcaatgcgtggtcttcaccgcgctcggcttcgttcaatacggcctcttcgtccttgccggtgaccatcgacttcacgtcgacccagccacggtgcagggcgccggccatgctgccggaatcttcaggatcgccacccaaggcacgcacagccgttttcagttcagcggcggctgtcgcgcaatcagcggagcgcttagcaaacagagccttgagttctggatgcttgatgtcttcagcgcattccttgaaacccttttggccgtcgatgctggtctcgatcaggtcgttcagtacggagatcgattctttgttgatatcagtcatttttcaattccttgtacgggttagaaggttgccttggttattgcagcgcccgtgccaggttttcaaaaattatttttatgtttaatttcaacaagttacgaattattgaaccatctgtatcttggttatttgcatgatctgtcatttggccttcatgcagaatgcctgtattttcgaaagcctggcctcaaccctgcgacgctcatgaatcccgaaaaactcgaactgctcatcacccgtcaaatgcccttcggcaaatacaaaggccggatcattgccgacctgcctgggccctacctgaattggttcgcccgtgaaggtttcccccacggggaactgggcggtttgctggccttgatgcaggaaatcgaccacaacggcctgtccgaattgctcgaaccactgcgcgccaaacacggcagacccgcccctcgccactaggagacccaccatgccaaggaatgccgataacgaagcgcactggcaggccatcgctcagcgctatgagtgcgagcccggcccgatcaacctggaaaacggctacttcgggcgcatgagccgggcggtgcaggcccagtaccttgagcacatcagctttatcaaccgcagcaacgcggtgcatgtgcgccagcgctttgagcagggcgaaaacatcgagatacgccgccagttggccgggttgattgacgtcgaccccgagtcggtcgcgtttacccgcaacgccaccgaagccttgcagtcgctgatccgcaactacaaccgcctgcaaccgggcgaccaggtgctgatcagcgacctggagtacgacacggtcaaaggcgccatgcgctggctggcagcgactcgcggcgtggaagtgatagaggtggcccacacccacccggccagtttcgacagcctggtgcaaacttaccacgacgccttcgcgcagtacccgcgcctgaaattaatggccctgacccatgtgacccaccgtaccggcctggtcatgccggttgcggccattgccaaggccgcgcgcgaacgcgcaatcgacgtgatcctcgacggcgcccacgccttgggccagatcgaattcaacctggccgaactgggcattcagttcgcaggcttcaacctgcacaagtggatcggcgcgccgctgaccctgggctttttgtacattgctccggagcgcctggccgatatcgacccggacatgggcgaattccactacccggccacggatgtgcgagcgcgtacgtcctacagcacgccgaacttccccgcgctgatgaccctgcctttggtgtttgacgagcatcggcaattgggtggcgctgcggccaagggcgcacgcgtcaattacctgcgcaacctgtgggtaaaccaggtgcgaccgttgccggggattgaagtgctgacttcggatgaccccagactgtattgcgggatcacagccttcaagttcatcgggcgtgatcagcagacgatggtggacaggctgctcaaggagcacggcctgttcaccactacgcgcacgggggcagcgtttggcacctgtatccgggtgacgccggggctggtgacgtcggcggcggacatcaacgcgctggtccacgcgatcacccaactaaacaccgtttaaaactgtgggagctggcttgcctgcgataacggtgtatcagccaaagatgggctaactgataaatagctatcgcaggcaagccagctcccaccttcagaacggcgatgtgtttgaggttttttacaggcaaaaaaaagcggcacaccgaccaagtgcgccgcaaaaatgccgttaagcacagcaacaacgattcgataaatcagttcagtccagcagcgccagcgcctgggcagtgacttcctgaatacgcgcccagtcgccattcttgacccactccggatccagcatccagctgccgcccacgcacatcacgtttttcaacgccatgtagctcttgatattggccggcccaacgccgccagtcgggcagaatttcacttccccgaacgggccgccgagcgccttgatggcagcaacaccaccgctgacttcagccgggaacagcttgaagcggcgataacccaggccgtagccttccatgatgccggaggcgttgctgatgcccggcagcagcgggatcgggctgtgcaccgaggcttccagcaagtcgcgggtgatgccgggggtgacgataaattgcgagcctgccacttctgccgcttcgagcatgtgacggtctagcacggtacctgcaccggtgcacagttcaggacgctgctcgcgcaagacctgaatggctttaaggccgaactcggaacgcagggtcacttccaacgcggtcaaaccgccggctgccagggcgtcggccaacggcaggatgtcctgctcgcgggcgatggtgatcaccggcaggatccgcgccttggcgcagaggctgtcgatcaaggcaactttatccgccatggacacggtcggttgagggcttttcatagcggctgatccttggctcatgggcaccagtaaatctctagagtaggttgcaaaaacgcgcgaatcggcatggcagcaacatcgtcgctggccaaggcggcgctcaaggtcgtcaatttcgaactgccggaaatcgacagcacggtgtagtcggccgtggtcagcaacgcacgactcatggtcaggcgctggtgcggcacagtgggcgccagcatcggccagcaacggcgggtaccgtcggccttcagcgcttcactcaggttggggctgttggggaacagcgatgcggtgtggccgtcatcgcccatgcccagcaccagcacatcaatggctggcaactcacccagcaggcgatcggcctgctcggcagcgtcttcaaggttggcggcagggctgtacaggctcaagaacttcgccttggccgccgggccttgcagcaaatgttgcttcaacaggccggcattgctgtcggcgtgttcgaccggcacccagcgctcatcggccagggtgatggtgaccttggaccagtccaggtcctgcttggccaggttctggaaaaacgccacggggctgcggccgccggacaccaccaacgtcgcctcgccacgggcagtgatggccccacgcagttgctcggccacgtcattggccaggccatcggccagcagcgcaggcgtacggtactcatgggcagtaacgccctgaggcagtttcaattcagatatcgccataccacgacctcccatcccgcgtgatcagtgcaatcgagctcatcggcccccaggaccccgccgcatacggcttgggcgcatcaccggattttttccacccggcgatcaactggtcacaccacttccacgcggcttcgatttcatctttgcgaacaaacaggttctgattgccgcgcatcacttccagcaacaaccgctcgtaggcatcggggatgcgtgcgctgcgataggtgtcggaaaaattcaattgcagtggcccgctgcgcagttgcatgcctttgtccaggccctgctccttggtcatcacacgcaaggaaataccttcgtccggctgcaggcggatgatcagcttgttgctgatctgcaggcgctgctcgggagcgaagatgtagtgggacggttccttgaagtggataacaatctgcgacagcttttgcggcatacgcttaccggtacgcaggtagaacggcacgccggcccaacgccagttacggatatcagcacgcagggcaacgaacgtctcggtgtcgctctgggtgttggaattgtcttcttccaggtaacccggcacggctttaccggcgctgtagccggcgatgtactggccgcgcaccacttgagtggtgaggccctcagggctgatcggcgccagggccttgagcaccttgaccttctcgtcacggatgctgtcggcggacaggtcggccggcgggtccatggcaatcaggcaaagcagttgcaacagatggttctggatcatgtcgcgcagctggccggccttgtcgaagtaaccccaacggccttcgataccaacctgctcggccacggtaatttccacgtgggagatgtaattctggttccactgggtttcgaacaggctgttggcaaaacgcagagcgatcaggttctgcaccgtctctttgcccaggtagtggtcgatgcggtaggtgcggttttccgggaaaaactgcgccacggcgtcgttgaccttgcgcgacgactccaggtccgaaccgatgggtttttccagcaccacgcgggtattttccgccaggccgaccttggacaggttttcgcagatcgcgccgtacaccgccgccggggtggcgaagtaggcgatcaggcgttgatcgctgccgactttttcggccagggcaacgtagtcgtcggccttcatgaagtcgacatgcacatacgaaaggcgcgcgaggaaacgctgggccacggcttcgtcgagttccttgccgacgtacttacgcaattctttttcgatatgggccaggtgttgctgctcggagccagcttcacgggccagggccaggatgcgtgtgtcgtcgtgcagcaacccggcgccatcgagctgataaagggcaggaaataacttgcgcagcgccagatcacccaaggcgccaaacagggcaaaggtgcagggttccacggttatcgaaggcatgatgtttgttcttttatcaagttaagctacaaataccttttttcaaggcatcactcaaggaaaaatgtagtaataaccacaacattttccggaaatacgcattgcgagtggtggtgttcagctaccctcagtaggataggccaccgcgaaaagccactcatcgattggttaccgcctttttatttgcatcgtcgcccgaaggaaagactgaatggaccgcgtgcgaaatcttctggaacagatccggaaccgcctcgaagaattgaacaaggccgagcgcaaagtcgctgaagtgatcctgctcaacccgcagcaggccacacgcttctcgatcgccgccctcgcccaggccgcctcggtcagtgaaccgacggtcaaccgtttctgccgctcgttcggtgtcagcggttaccctgaacttaaattgcaattggcgcaaagcctggccagtggcgccgcgtatgtcagccgcgccgtggaggccgatgataaccccgaggcctacacccagaagatctttggcagcgccattgcctctctggacagcgcgtgccaggccctggacccggcgctgatcagcaaggccgtggacttgttgatccaggcacggcagatccacttctttggcctcggcgcttcggctcccgtggccatggatgcgctgcacaagttcttccgcttcaacctggcagtgaccgcccacgccgacgtgctgatgcaacgcatgatcgcctcggtggcgcacaccggagagttgttcgtgatcatctcctacaccggccgtacccgcgagctggtggaagtggcgcgtatcgctcgggaaaacggtgcgtcagtgctgggcgtgaccgccgagaactcgccgctggccaaagccagtacggtgagcctgaacatcccgttgccggaagacacggatatctacatgccgatgacttctcggattatccagttgacggtgctggatgtgttggcgaccggcatgacgttgcgccgtggcgtagattttcagccgcatttgcggaaaatcaaagagagcttgaatgacagccgatatccggtgggggatgaattcaactaaatccgtgtcaactgatcgttcccacgctccgcgtgggaatgcctcactggacgctctgcgtctgcctttagcgtcgtgacgcggagcgtcatagcctgcattcccacgcggagcgtgggaacgatcatgaattcaactagcaggcagctcttccagcagtaccggcgctatcgcaggcaagccagctcccacaggggaatgcattccaaaggtgggagctggcttgcctgcgatagcgccatcagccacaccgctaaacccctgccctggcctgcaaactcaagtgggccctctcccccggcgccagactcgccgccgccatcgccgcctccacacacacaaaccccgacgcttcgttaaagctcacgcccaacagcggccggctccccgggtgccacaccaccgtgtcggcagtgtcgcccgtgtcgatgcacagttcacgctgccaggcgtggtccttgagctgcagttcaccctcatgctggaacacccgctggcatccaccatcgacccgcaattcgccttcctgctgacaaacctggcgattgagctggtcataaccttgcgctccttcgagcccagacagcgctacctcatcaacgtgaccaatacgccagtaagcgtgcaatgcatggctcaactggcacggcagctcgtcgtggtgctcggtactcaggcgcagttccagggtgtcgcccaggtgcgcgtgcaagtccacctgccagtcgcacagttgcaattgccagtgcagtcgcacgccgtcgtcatcggtgctgctgtcgagcagcttccagtcgatcaagcgggcccaaccgtgggaaggccaggcattttcgctggggtggcggccataccaaggccagcacaccggcacgccgccacgaatggcgccgacctgtggccacttggccgcgcaccacagccaaggcttctggccggtgggctgaaagtgcaacagttgcgcgccctggcgactgaacaccgcctggcacagcggatggtcgatcaccaacacatcgcgcatctgaaagcgctcccaggcgaacaccggacgctcgcgcagggatttgaaaaagcgttgcagcggttgctcgtgcatgtgcccaggtcccgaatatcacagtgccacgcaaaaaaaagcggatagccatggctacccgcaaatgcgcacagagagaggagcttatcgcaacagcgttagaacgtagactgaattttcaggcccgctaccagcgcgttgtcgactttatccacgccgccaggctggacaacgtactgcaggttcggacgcacagtcagccagttggtgacgtggaaaccgtagttgagttcgacgttgtactcagtctcacgaatcggcgtgtacagcggattgtcgtaatcgctcacgcccctggcgtcgttgagcagctcagagttcttcttcacatcattgttgacatgcaggcgagcgacgccaatgccgacgtcatcttttggacgcgcgtcgaatgggcctttgtacaccagcatcaacgactggtagttgtcgaccaggttggtttccttgtcatggaaggtcgcgttggcggcgatgttcaggccacgggaagcgtcgccgttatgggtggtgagttgctgttgcgcaacgaaccagtagcctttcttgctgctacgggtacggaagtcggcgccgctgaggaccgcatcgttaccgttgacgtcttcacgtacatccggagcatcggccgcacttttatagaagcccacacggtattcgcccggcaggttattaaccttcggcgaccataccaattccaccgggatcacggtgcccttggtaccactgccgctgagtttgaagccgttgccgtgctccagctgcgaagggttctggttgtaggcaccgatttgcgcatacagctcaggcgtgatgttgtacttcacgcggatagcggcctgggcgaccggccagttgtaccaggtattgacgtagttaccgacctgggaaccgcagaacgacaggttctggaagtcgcaagggaaggtgttgaagtcttcgccttcaccgaagtaaccgagcttcacgtccaacttgttgtcgaacatctggtgctgaatccagaactgggtcaggcgcaccatgtggccacggccatacacttcttgcgaggaactcaaggtgccggcacgcgggtcgccaatgcggtcattggagatgttctggccattacgattggtcaactggatcttggcctgagtgttatcccagccccacagtttttgcaggtccaacgccacgcccagaccgaactggtcggagtaacgaccggtcttgtcgtcgttgtagccgccgtgggcgttgtagcccatctcgcccacgtagtcggccttgatgtcgataccttgctcgatcagcttggtacgctcgccgccccaatcgccggtcatccacttggaatcggcgctgaatgcatcggccgccatcgcattggcggacaatacaagggctgctgccgctgacagttggcagatcagccgggtgttgttgtgttgctttttcatccctacatcctcgtctttattgttattaaactgtttttatctaacgcgggttacattttttaactaaaacaatcacttatcttgcttaacggcccttgaactgggtcacattgtcggcatgcccctgtgccggcaatgaagcagccgtgcccaaccgctcgccggtcttggcgtcaaacagcaataccttggccgggtcgaactgcaaggtcagggtctcgcccacttgcggtgccacgtccggcgccaaacggcagcacaccttggtgtcgttgagctgcacaaacaccagggtgtccgggccggtaggctcggtcacctgcacttcggcgcgaatgctcgacgagccgttgccctcgcctgctgccagcacgatctgctccgggcgcaggcccaggatcacatcgcggtcttccaacccggcgtcactcatgcccaacggcaactcgcaacgggcctggccgctgtcgagcaccgccaccagatcaccgttctggcgttttagccgcatgggaacgaagttcatcggtggtgaaccgataaagcttgccacaaacaggttggcagggtcgttgtaaatttccttcggcgtgccgaattgctggatgatgccgtccttcatcaccgccactttatcgcccagggtcatcgcttcgatctggtcgtgggtcacgtagacggtggtggttttcagacgctggtgcatcagcttcatttcggtacgcatctcgacgcgcagcttggcgtcaaggttagacagcggttcgtcgaacaggtaaatcttcggccgtcgcgccagggcacggcccatggccacgcgctgttgctgaccaccggacaactggcccggcttgcggttgagcaagtgctcgatttgcagcaatttggccacgcgcgccacttcggcgtcgatgtcggcttgcggcatcttgcggatcttgaggccgaactcgatgttctcgcgcacgctcatggttgggtacaaagcgtaggactggaacaccatggcgatgtcgcggtccttggggctcatgccgctcacgtcttgatcaccgatcatgattgcgccgccggtgatggtctcaaggccggcgatgcagttcatcagcgtggacttaccacagcccgacgggccgaccaggatgaggaactcgccttctttgatcgacagttcgatgttcttcaaggtgtcgggcaggccggcgccataggtcttgtttacattgcgaagttcaagcgtagccatgattaccccttgaccgcgccggccgtgaggccgcgcacgaaatacttgcctgcgatcacatagaccagcagggtcggcagcccggcgatcatcgccgccgccatatccacgttatattccttggccccggtgctggtgttgaccaggttgttcagcgccaccgtgatgggctgggagtcgccgctggagaacaccacgccgaacaggaagtcgttccagatctgggtgaactgccagatcaggcagaccatgatgatcggcgtcgacatcggcaggatgatccggcggaagatggtgaagaaccccgctccgtccaggcgtgcggccttgatcagcgcatccgggatgctcacgtagtagttacggaagaacagcgtggtgaacgccaggccgtagaccacgtggataaacaccaggccggtggtagtgctggccaggcccatcttgccgagggtgaacgacgcgggcagcagcacggtctggaacggcaggaagcagccgaacagcagcaggccaaagaacagctgcgaaccgcggaaacgccagaacgacaacacgtagccgttcaaggcgccgatggcggtagagatgagcacagcaggaacggtgatcttgatcgagttccagaagtagccatccacagtggcccaggccttgacccagccgatgccgctgaccactgtgggccaactcagcaggttaccggtgctgatgtcttccggggtcttgaagctggtgagcaacatcaccaccagcggcaccaggtacagcagcaccgccaggatcagcaccgcgtagatcgcgatgcggctcaggctgatggcaggtttggcggcgagactagtcattgcgcttggtcctcagctcggaatacaggtacggcacgatgatcgcgaggatcgcaccgagcatcaggattgcactggccgagcccatgcccatctggccgcgactgaaggtgaacgaatacatgaacatcgccggcaggtcggacgagtagcccgggccgcctgcggtcattgccgccaccaggtcgaagctcttgatcgcaatgtgcgccaggatcatcaccgcactgaagaacaccggacgcaggctgggcagcaccacgctccagtagatgcgcggcaagctcgcgccatcgatctgcgcagcacgaatgatcgactgatcaacgccgcgcaggccggcgaggaacatcgccatgataaagcccgaggcttgccacacagcagcgatcaccaggcagtagaccacgcggtccgggtcgatcagccagtcgagacggaagccttcccagccccagtcccgcaagagtttgtccaggcccatgcccgggttgagcagccatttccaggcggtaccggtgacgatcatggagagcgccatcgggtacaggtaaatggtgcggataaagccttcgcggcggattttctggtcgaggaaaatcgccagcagcacaccgatcaccagggtgatgccgatgaacatgccgccgaacacggccaggttcttgctcgccacccaccagcggtcgttatcgaacagccgctgatactgcgccaggcccgcccatttgtagctgggcaggaaggtcgaggtggtgaacgacagcacgaacgtccacaggatgtagccataaaagcccaccagcacgatgagcatgctcggcgccagcaccagtttagggagccagcgctgcagcacatcgaatggcgaggccttgctgaacacagcaacagaactcatgggaaaatccagtacagggaaaaaggactagcaactgaaccgaaccctgtaggagcgagcttgctcgcgaaggacttcaacgataacgcgtgcatacaggatgaacgcggtgaccttgagtttttcgcgagcaagctcgctcctacagtggctgtgttacttggccgacttgatcgccgcgccaagcttcttggccgtgtcggccgggtcggctttcgggtcgttgataaagttggtcacgacatcgaagaacgcaccctgtaccgccagggtcgtggccatgttgtgggccatgcttggctgcagaccgccagtcttggcgtcggccaaaaagtccttggcggcggtctgggcgcaagaatcaaagccgtaggattccatcttggtcagcatgtcgttacgcacagggatcgagcccttgttgatgctgaacaccttctggaagttttcacccagcacgactttggcgatgtcctgctgacccgcggcagtgcctttgtctttctgcttgaacaccgccagggagtcgatgttgtaggtgaaggctttgtcggtgcccgggaacgctacgcactcataatccttgccggcgactttcttggcggcggtccattcggacttggcccagtcacccatgatctgcatgccggccttgccattgatgaccttgcccgcttccaggttccagtcctggcccttgccgtcgacgtccatgtaggtcgcgactttcttcagctcggtgagggccttgaccatttccgggccggtcaatgcgccgttatccaggtcgaccagggctttcttgtagccatcagcgcccattaccgaaagcacaaccgcttcgaacacggtgctgtcctgccaaggctgaccgccgtgggcgagcgcaatgaagcctgcagccttgagcttgtcgcccgctgcgtagaattcttcgagggtggttgggttcttggtgatgccggctttcttgaagacttccgggttgatccacagccagttcacgcggtggatgttcaccggcacggcgacgtagtcaccgtcgtatttcacggtgtcggagactttcttgtcgagcagcgaatcccacttttcttctttggcgacgtctttgagcacgtcggtgtcgagcaggccagtcgacgcccactcctggatgtcagggcctttgatctgggcaacgcctggcgggttgccggcgaccgcgcggcttttgagcacggtcatggcagtggcgccaccgccgcctgctacagcaccgtctttccaggtgaagccgtctttctcaacttgggccttcaggacatccacagccgctttttcaccgccggaggtccaccaatgcaccacttccaccgtacctttggagtcggcggcaaatgcactgagggggaacaacgaggcaatggaaatagcgacggcgaggcgattaatcgcgttcatctgagtaccttttcttgttgttatgcatgcaagtctagagcttgcgctgcacggagtttaaacatggattttcggggcacaggtaacaaagggacgcgcaaatgtcaccacttggtgacatagcatccactgcccaatgcactggccaagctgggtgccaagggcagtgcaggcagcacaaccgcttgccaggcatggtacaggtcaggtttgccgccccagattttgctgctgggttggttgtgcgggctgagttcgtgatgccaactgccctggagccggtcgatgaagtgggtttcgcaaaattcccagaagcgccggtaccaggtttcgtaatgcagctcgccgctacgtttgagcagcgcttgagcggcggcgctggcttcagcatgggtccagtgcaggcgctcgcgtaccaccgggcgctggttccaatccaaagtgtagacaaggcccggcgcaccatccaccgcccaggcgtactcgcaggcactggcgaacaggcctttggcgtcgctcaccagccagtccggcgtggccagcttggccttgaggcgtgcagcttccaggtgcagcagcaaccgcgcccattcaaaaccatggccgggtgtgatgccgtaagggcgaaagccatcggcggggttgtcttggttgtaaccgagcaagggcttccactgcgcgtcgaaatgctcgatcaccatgaactggttgccggcggcgtgggtgtggatcactcgctcgacaatgcgcagcgcgcggtccagccagcgtgtatcaccgctgacatcggccaacgccaggaaggcttcagtggcgtgcatgttgctgttggcaccacgataggcttcgacgccgctccagtccccagcgaaggattcgagcatgacgccctcctcttcgctccagaagaactggtcgatgatatggatagcgtcgttcattaatgtgcgcgcacccggcgcgccggccaccacggcagagctggcggcgagggccacgaaggcgtgcaggtaggccgccttaccggtattgccatcaaccgcatggggcgcggcgaaccagccaccgtgctcgctgtcgcgcagcgggccgctgagcgccgccacaccgtgcgccaccaactcggcataacccggcaaccccatggcatgggccatggcaaagctgtgggtcatgcgcgcggtgttcatggtttcggcgcgggcattggccggcaactggcctttatcgtcaaggttgccgaaaccgtccggcaggcgcgatgccttggcgaacgccagcagccgctggccttcggcggcgagccaggcgtgatgggcaggtgcattcagccaactgctggcaggcagtggatgggtggtcatgggtggcccttattgtttttttgggatgaccggagtctaaacaagggcgtgggatgggcaagtaacgaaagggatggtaaatgtcacaaaatggtgacaatcaacagcctaatcctaatgtaggagcgagcttgctcgcgaaaagccaacaagcgccgcgcttatccaggaaacccgcgtgatcgttaacgtttttcgcgagcaagctcgctcctacagaggacgatttgcgttcattggcccagtggtgtggccgcagccggcgcattaaggcgctgattcaagttctgcacctggctttgcaaggtggtgatattgcgcgtggtctggatacggaacacgtcgaattccttgttggtcggcgcgtcgacgttgaccggctggttttcctgggcgctcttgagtaccagcaggtcttgctcgagacgggcgatggccgcactcgggttgccttgtttcttcaaggcggccacatcggtggccaggcccttgacctcggcctgtgctgccgtgaggctggcgaccgcgtcagtgagggcctgcacctggccttgcagcttggtattggccgctgtcagttcggtggtgctggcactcatctgggccaggcgggtgtccagttcggaggcctgccccgcgacgcccaactgttgcttgccctgctcctgcaactgggcttccagctgcttgatctgcagtttcaaggcttcgctgccgttgttcacattggcttcgctggccacgaccttgccggagatcgcctgcaggcgccccgccgcttcttcgctgatacgggcaaaactctcctgggtggcgaccaactgctggcccatcagggagatctgctgaaagctccaccaggccaggcccgcgaaggcgatcaacagcgcgccaaccaatgcccacaacggcccggtgctggcgctcttgaccttgaccacgggcgtcgttcgcgaacgcaccgacgtcgcggcggtcggcacgaaatcatcgtcatccccagtatcggcccgcaggctgggaacgttgtcgaagtcgtctttagcatcgttacgcatgaatctaccctgaatcaatgagatggctggctgcaaggccgagcggcaggagtataaaccgcactcccggcgcatggatcgactcggaacctgcaattgggttcccgaagtgttgctgcttatgagcttattggcggcccgggtcctgggctttccaccagctgcagaactcgtcgagcgcggcccacaggctgaccttgggctcgtagtcgagataatgcctggcgcggctgatgtcgagggtgaaatctttgttcatcacctgcatgcccaggcgcgacaacgctggttccggccgccccggccatatcgcgcagaaggcttcattcaaggctgccacgctgtaagacacaccgtaggagcggtaacgggtcacctgaggcagctccatttgccgcatcacgtagttcaccacatcccagatcggcaccggtgcgccgttgctgatgttgtaggctttgcccagcgcagagccggtggcgagcaaactgctgagcagcgcctcgttaaggttatgcacgctggtgaagtcgactttgttcaagccgtcgccgacgatcgccaggcggttcttgcgctgcattttcagcaggcgcgggaagatgctcatatcgccggccccggtgacaaagcgcgggcgcagggcgatcacttgcaggccgaactcctgagcgccaaagaccttctgctcagccaggtacttggtagcggcatagggatgcttgaaacgcttgggcacttgttcttcggtgagccccagatggtcgcgaccgtcaaagtagatcgacggcgacgacaggtgcaccaggcgcccgacgcgctgtttcaggcaggcctcgacgacgttttcggtgaccagcacattattctggtggaagtcctggtacttgccccacagcccgacggcgccggcgcaatgcaccacggcttcgacatcgcggcacaggtcgcgcaccaggtcggcgtcattcaagtcaccctggataaactcggcaccacgccgtaccaggtgctccacaccctcggcgcgccgcccgttgacccgcacgtccaggccctgttcaagggcgaagcgcgcaaagcgcccgccgatgaagccgcttgcgccggtgaccagaattttcatgtagtactccgtgttctttcgtttttcatcgctgttgccttgacgcgcgctatcactccaacggcaccaaccaatggccacacacatcggccagatggtcggtcaacaagcccaacagttgcccgccactgcgccaatgatgccagtacagcggcacatcgatgggcttatctggcaataactcgaccaatacgccggtttccaactggtcacgcacctgtaattcaggcaccagcccccaacccaagccggcttccgtcaggcggataaatccttcggatgacgggcatagatggtgttcgaaaccaccgtccacgcctagggacgccaggtagcggtgctgcagaaaatcatccgggccgaacaccagcgcaggcgtgcgcgccaattggtcggcccgcacacctccaggaaaatgccgcgccagaaaggccgggctggccagcgcccgataacgcatggcgcccagcaacaggctgcgagccccggccacgggacgttcgctggcacaaatgcaggccgccacttcaccggcgcgcatgcgtttgaggcccacggtctggtcttcgaccaccaggtccagcagcaaatgctgttcggcgcagaagtcgctgaccgcctcggcccaccaggtggcgaggctgtcggcattcagggcaatgcgcagacgctcgggcataccctcctcgtccagggccggtacctggctttgcaggtcacgctccagcaaacgcacctgctgcacatggttgagcaggcgccggccgatatcggtgggcgttggcggcgaggcccgtatcaacaccggctggccgatgcgcgcctccaatagcttgatgcgttgggagatggctgactgcgacagccccaacacctgggcaccgcgctcaaagccggcttgttccaccaccgccgccagggcagaaagcaatttatagtcgaacatcagtttctctaatgagcgatcagcaatattggtttttcttatacaaccttgagcggcaccatagccagcatcgtttgagcatcaacaaggatctccttctatgtggcaaagctatatgaacggtttgctggtggccctcgggttgatcatggcaatcggcagccaaaatgcattcgtactcgcccaaagtctgcgccgcgaacatcacttacccgtggcggcgttgtgtgtgatctgcgacgcactgttagtggccgccggggtatttgggctggccaccgtgctggcgcagagcccgatactgctggcggtggcacgctggggcggcgctgcgttcttgctctggtacggcgcgtgcgcgctgcgcagggcctgctcgaaacagagcctggaccaaagcgacagcctcaagacgcgctcattgcgcgccgtattgctgagcgccctggcggtcaccttgctcaacccccacgtttacttggacaccgtcctgctgatcggctccctgggcgcgcaacaaaccgaaccgggtgcctacgtagccggtgcggccagtgcttcattcctgtggttcgccaccctggcgctgggtgcggcatggctggcaccctggctggcacgcccggccacctggcgcttgctggacctgctggtcgccgcgatgatgttctctgtggcctatcaactgatcagcgcctgacgaatattccaaaacgcgctggaacctctatcccacacagttgttgcgtggttatgccgcacccccggtgctatgatcggccccctgcgccgcaaagagtacaaactccccggcgcatgtttggccgcccgtgatcggccttgcgctcaccgcaactgacctgattaggagaatcatcatggctttcgaattgccgccgctgccctacgcacacgatgccctgcagccgcacatctccaaggaaaccttggaataccaccacgacaagcaccacaacacctatgtcgtgaacctgaacaacctggtgcctggcaccgagttcgaaggcaagaccctggaagagatcgtcaagtcttcctcgggcggcatcttcaacaacgccgctcaggtctggaaccacaccttctactggaactgcctggcgccaaacgccggcggccaaccaaccggcgcgctggctgaagccatcaacgctgcgttcggttcgttcgacaagttcaaggaagagttcaccaagacttcggtcggcaccttcggttccggttggggctggctggtgaaaaaggctgacggttccctggccctggccagcaccatcggcgccggcaacccgctgaccaacggcgacaccccgctgctgacctgcgacgtctgggaacacgcctactacatcgactaccgcaacgtgcgtccaaagtatgtggaagcgttctggaacctggtcaactggaagttcgtggctgagcagttcgaaggcaagaccttcactgcctaagtaacgcttgcagtagaaagagcccggcgattgccgggcttttttatgcgcgccaggctgacagcgcagagataccggaactcaaccgtaacaattgaccacacaaacgtcaggaggaataaccctcctgaatcaatgtggagcatgacgatggatcctatttcgatggcagcaggggttgcaggtgcggtcccagtggtagcgggtattgctgataaagggctggacctggcaaaaggcgcaatggacttggcaaacaaagccctggacatggtcagtgaaggctcgaaaatcggtggggaacagcaacagcctcagggccagatcgatttttcttaaatcgtcgccaactagaaggcggatagcctccgccttctccgctgctgcactctaccctttcctgtttatgacaagcccgaacatcagcgggcgcctacctgcgtttatccagcccaaacctcaattaagccaaggccccaatgtccctttgactgccatcaccagattgccaatactcatggcatattgacggccacccgcatgagacaaggaatgccccctttgaagctggaactcaagaacagcttgtcggtgaagttgctacgggttgtgctgctgtcggccttgatcgtgggtgtggcactgagcgcggcgcagatcgtttttgatgcctacaaaacgcgccaggccgtggcaggcgatgcccagcgcattctcgacatgtttcgcgacccctcgacccaggccgtgtacagcctggatcgcgagatgggcatgcaggtgatcgaaggtctgttccaggacgacgctgtgcgcatggcttctatcggccaccccaacgagaccatgctggcggaaaaaaaccgccctttacagcagtcccccagccgctggttgaccgatctgattcttggccaggaacgctcctttaccacttcgttggtgggcaagggcccctatagcgaatactacggcgacctcagcatcaccctcgacaccgccacctacggccgaagtttcctggtcagctcggtcatcatctttatctcgggcgtattgcgcgccctggtcatggggctggtgttgtacctggtgtatcactggatgctgaccaaaccgctgtcgcggatgatcgggcacctgacctcgatcaacccggaccgtcccagcgagcacaagatccctcagctcaagggccacgaacgcaacgaactggggcagtggataaacaccgccaaccaattgctcgaatccatcgagcgcaatacccacttgcgccacgaggccgagtcgagcctgttgcgcatggcccaatacgacttcctgaccggcctgccgaaccgccagaagttgcaggcgcaactggacaagatcctcacggacgccggacgccggcaacgccgtgtcgcggtgttgtgcgtggggctggatgacttcaagagcgtcaacgagcagttcacctaccaggccggcgacaaactgctgctggccctggccgaccgtctgcgcgcccacagcggccgcctgggtacgctcgcccgtctgggcggtgaccagttcgccctggtgcaagccgatatcgaccagccctacgaagccgccgaactggcgcaaagtattctcgatgacctggaggctgaattcgccctcgaccacgacctgatccgcctgcgcgccaccattggcattacgctgttcccggaggatggcgacagcaccgagaagttgctgcaaaaagccgagcaaaccatgaccctggccaagagccgctcgcgcaaccgttatcagttttatatcgccagcgtcgacagcgaaatgcgccggcgccgtgaattggagaaagacctgcgcgatgcgctgagccgcgagcagttgcacctggtgtaccaaccgcaaatcagttaccgcgaccatcaggtggtgggcgtggaagccctgctacgctggcaacaccctgagcacgggctggtaccgccggatttgtttatcccgctggcggaacagaacggcaccattattcccattggcgaatgggtgctggaccaggcgtgccggcaactgcgcgaatggcatgaccagggcttcacggcgctgcgcatggccgtcaacctgtccaccgtgcaactgcaccacaccgagttgccgcgggtggtcaacaacctgatgcagatctatcgcctgccgccgcgcagcctggagctggaagtgaccgagaccggcctgatggaagacatcagcaccgccgcccagcacctgttgagcctgcgccgctccggggcgctgatcgccattgatgacttcggcactggctactcatccctgagttacctcaaaagcctgcccctggacaagatcaagatcgacaagagcttcgtccaggacctgcaggacgacgacgatgacgcaaccatcgtgcgtgccattatccaactgggcaaaagcttgggcatgcaggtgattgccgaaggagtggagactgccgaacaggaggcctatgtcatctccgaggggtgccatgaggggcagggttatcactacagcaaaccgctgcaggcccgggagttgacggcttatttgaagcaggccgagcgcaataacgccgtgagtctttgaatttacacttcgatactcaatatttcccgcgtataagcctttacacaaaatgcaaatctttcgcattatgtcgcagcgtttgcgctccccgcgcgccctttcaacaaccgaagcaggatgttcgccatgattcgtatgcccctggccaccgccagtctgctggccattgccatttctctcgccggttgcggcgaaggtaaagacaaggccgccgcgccccaggcacccgctgccgccagcactaccgcaccggcggctgccccggcaggccaggtcgacgaagcggccgccaaggccgtggtcgcgcactacgcagacatggtgtttgcggtgtacagcgatgccgaatccaccgcaaaaaccctgcagaccgcaatcgacaccttcctcgccaacccgaacgacgaaaccctgaaagcggcccgtaccgcctggatcgccgcgcgcgtaccctacctgcagagcgaagtgttccgcttcggcaacaccatcatcgacgactgggaaggccaggttaacgcctggcccctggacgaaggtctgatcgactacgtcgacaagtcctacgaacacgcactgggtaacccaggtgccaacgccaacatcatcgccaataacgagatccaggtgggcgaagacaaggtcgacgtcaaggacatcaccccggaaaaactcgccagcctcaatgaactgggcggttccgaagcgaacgtcgccaccggctaccacgccatcgaattcctgctgtggggccaggacctcaacggcaccggcccaggcgcgggcaaccgcccggcgtcggactacatgaccggagacggtgcaaccggcggccacaacgagcgtcgccgcacttacctgcgtgcggtcacccaactgctggtcagcgacctgcaggaaatggtcgacaactggaagcccaacgtcgaagacaactaccgcgccaccctggagtcggaaccgggcaccgacggcctgcgtaaaatgctgttcggcatgggcagcctgtccctgggcgagctcgccggggagcgcatgaaggtgtctctggaagccaactcgccggaagacgaacaggactgcttcagcgacaacacccattactcgcacttctacgacgccaagggcatccgtaacgtctacctgggcgaatacacccgtgttgacggcaccaagctgaccggcgccagcctgtcgtccctggtggccaaggccgacccgggagccgatgcagccctcaaggctgacctggcggccaccgaagcgaagatccaggtgatggttgatcacgccaacaacggtgagcattacgaccagttgatcgccgcggacaatgaaaagggcaaccagatcgtgcgtgactcgatcgccgccctggtcaagcagaccggttcgatcgaagccgctgccggcaagctgggcatcagcgacctgaacccggacagcgctgatcacgagttctgatcaagcgcagttgaaagaggcgacctgcgggtcgccttttttatgcgcgcaataactgctgcacctatctctgtgggagctggcttgcctgcgatccagacaactcggtgattcgggcacaccaagtcgataccttcgcaggcaagccagctcccacatttggatcgtgatgtgtcaggtagataggcgccagtgggtaggtcgtcacgggagcaagctccctcgccacagcttcagcgtcgctgcgaagttgtgtagaccccaagccaccgtagcccttggtttacaagacctgcaccacaggtagaatggcgcctctgcccaatcacccgagcgaacttcatggcgttgccgaccctgcgtatcatcggtttcatcatcggcatcttcctgatcacccttgcggtcgccatggtgatcccgatggcgacactggtgatcttcgaacgcaccagcgacctcccctcgttcctgtgggccagcctgatcacctttatcgccgggttggcgctggtcatccctggccgccccgagcacgtgcacctgcgccccagggacatgtacctgctcacggtcagcagctgggtagtggtgtgcatcttcgccgccctgccctttttgctgacccagcacatcagctacaccgactcgttcttcgaaagcatgtccggcatcaccgccacaggctccaccgtgttgagcgggctggacagcatgtcgccaggcattttgatgtggcgttcgcttttgcactggctcggcggtatcggctttatcggcatggcggtggcgatcctgccgctgctgcgcattggtggcatgcgcctgttccagaccgaatcttcggaccgctcggaaaaagtcatgcctcgctcgcatatggtggcgcgcctgatcgtggcggcgtatgtgggcatcaccatcttcggcagcctggccttctggtgggccggaatgggcgtgttcgatgcgatcaaccatgccatgtcggcgatctccaccggtgggttttccacttcggacgagtccctggcccattggaaacaaccggcggtgcactgggtcgcggtggtggtgatgatccttggcagcttgccgttcgccctgtacgtggccaccttgcgcggcaaccgtcgggcgctgatcaaggaccagcaagtgcaaggcctgctcggcctgttgctggtgacctggctggtactcggcacctggtactggtggaccaccaacctgcattggctcgatgccttgcgtcatgtggcgctgaacgtgacatcggtggtgaccaccaccggctttgcactgggggactacagcctgtggggcaacttctcactgatgctgtttttctacctgggctttattggcggctgctcgggctccaccgccggcggcatcaagatcttccgtttccaggtggcctacatcctgctcaaggccaacttgaatcagttgatccatccccgcgcggtgatcaagcagaagtacaacggccatcgcctcgatgaggagatcgtgcgctcgatcctgactttttcgtttttcttcgccatcaccatctgcatgatcgccctggccctgtcactgctgggcgttgactggatgaccgcgttgaccggcgccgccagtaccgtatccggcgtgggccccggcctgggcgaaaccatcggcccggccggcaatttcgccaccctgccggatgccgccaagtggatcctgtccctgggcatgttgctgggacgcctggagatcatcaccgtgtttgtgttgtgcattccggcgttctggcgtcactgacggtcgacatttgctgcaaccgcgcccggtattcgccgggcgtggcatcgaaccagcggcgaaaggcgcggaaaaagttactcgggtcggcaaaccccagcaggtaggcgatttccagcagggtcatgttgggttgtgccaggtactgctcggccagttcgcgccgggtgtcatcgagcaaggcctggaagctggtgccctcctcctgtagccgccgctgcaaggtgcgctgggacaggtgcaacgtctgggccaccgcttcgcgcttgggttcgccctggggcagcaggcggcacagcacctgacgcgccttgtgggtcacgcggctttcggaaaaacgcgccaggtattctccggcaaagcgatcatgcaacagcgccatggcttcattggctgtgggcagcggcgcctccatgtcggcctgctcgaaaatcaacgcgtcatagggtgcattgaattgcaaaggcgcgtggaaggcgtgttggtagggcgccaagtccgccggctggtcgccttgcagcagcactttgcgcggttgcagggtgcgcccggtaagccagccgcacagggccagagcgctggccagcgaggcctcggcgctttgacgggtgggcggcagatgatcgccatgcaccgtcagaatcaacgcatagccttcgggtaaaagtcggaaactcaagtcagcgctttcggcgatgatgcgctggtagcgcaccaagcgcataaagccttcggccagggtgttgctggacatcaacgcataaccggcaacatgaaacgaggcaggccgtaccaccttgcccatgttcaggccaatcgccgggttgcccgacacctccaccgcacgctgccacaagcgggtcatggcgtcttgcgggaagcgcgcatcggggtcagtgagggacgcataatccaggcccaactgcttgaacaaggccctgcaatccaggccatccatttccagcgccttgacgatgcccatcgcccagcttgcagaagttgttcgttcgctcatggcgtcttcttattgaaagcaggctcaaacggcagccaggaagccaaggatactaaagtggcatctattgtcactggctgttagcactgttcactctagactcaaataagctccccgccgcgcacccgttggcggcacaacaaccagagggccggtcaccgtggaaaacatcaagaaattcaacagttttgccgagttctacccgtactatctggccgagcatggcaacagcacctgtcgacgcctgcactttatcggcaccaccctggtgatcggcattctcgcgtacgccatcggcagaggctcattggtcctgctgctggccttgccgctcgcgggctacagctttgcctggataggccacttcttcttcgaaaagaaccgccccgccacctttcagcacccgttttacagcttgctgggcgactttgtgatgtaccgcgacatgatcctcggcaaggtgccgttctaagacttgccccttgtaggagcgagctcgctcgcgaagcacctacagacaccgctggctacctgacgcaccgagttatcgttgacgcttttcgcgagcaagctcgctcctacagtcttttaggagaaaaatgggcgagacagtcgagataaaagtctttttgtcatttacggtgctgtatcctgccaaggctttttgagagcgcggaatcacctgcgattgaaaaaacagaccttgcgaggagcgaccacgatgcacgagatacctaatctccccttcccaagcctgcacccaactgagcagccaacaccgcagcaggccagcgacaagcagcctgaggccaaagaagcaaaaccagtcgagcgcgaaagccgggactgacgccgtaccagaccgtgtggaaagcgcgcctttgagcgctttccacactgcctgaatcatccgagaccttcactatgaccacttccccttccgacacgccggacgccgccgtactcgacgctgccttgcaaatggtcgaagtctggaaccgcctcagtgccgacaagcaagcggcactgctcaagcgctttggcactcaggaaaacgccctggcggccctggtgaccacccaattgctggcccccgcccacgcttgatcggctttagatctgacgttttacatttttgccgccctgcccggcctgcgcgccggtatcattagcagcctatctttacctgctgcgacagtggatctctcccatgccagatacccagcgccctatggcggtcacgctgcaagtcgtttccatcgtgctgtttacctttatcggctacctgaatatcggcatccccctggccgtattgcccggttatgtgcatagccaactgggctatggcgccgttatcgccgggctggtaatcagcgtgcaatacctggctaccctgctgagccgcccctatgccggcaagatcatcgacaacctgggcagcaagcgcgccgtgctgatcggcctggtgggctgcggtttgagcggcgtattcatgttgctggcggcgtggttctccagcctgccggccttcagcctcggttgcctgctgatcggtcgactggtgttgggcagcgccgaaagcctggtgggttcgggcgcgattggctggggcattggccgtgtcggcgcggcaaacacggccaaggttatttcctggaacggcatcgccagctacggcgcgttggccgtcggcgcaccgttgggggtgctgctggtcagccacttgggactgtggagcatgggcgtcagcatcattctgttggccgtgctgggtgtgttgttggcctggaaaaaacaagccgcgccgattgtgcccggcatccgtttgccgttcatgaatgtgctgggccgcgtgctgccccatggttgcgcgctggcattgggctctatcggctttggcaccatcgccacctttatcacgttgtattacagcacccagcactgggataacgcggtgtgggccttgagcctgttcggtgccagctttatcggcgcgcgcttgctgtttggtaatttgatcaaccgcattggcgggtttcgcgtcgccatcgcttgcctgtcggtggaagtgctgggcctgctgttgctgtggctggcgccggatgcccagctggcgttggcgggtgcggcgttgagcggcttcggcttttccctggtgttcccggcgttgggggtagaggcggtcaacctggtgccggcctccagccgtggctcggcggtgggcgcctattcgctgtttatcgatttgtccctgggcatcaccgggccactggcgggcgccgtggcggcaggttttggctttgcctcgatcttcctgttcgccgccctcgccgctttcgccggtttgctgctgagcgtctacctgtaccggcaggcgcccaaggcccgcgaaacacgcgacgcctagaagtcgaccttgccgcgcccggccttgatgctgccgcgcttggtcttggactccaggcggcgtttcttcgagcccagggtaggcttggtcggacggcgttttttctcgaccttggtggcgctctggatcaactccaccaggcgctccagcgcatcggcgcggttctgctcctgggtgcgatattgctgggccttgagcaccagcacgccttcgctggtgatgcggctgtcacgcagtgccagcaagcgttccttgtagaactccggcaacgaagacgccggaatatcaaaccgcaggtgcaccgcactcgacactttattgacgttctgcccaccggcaccctgggcgcgaatggcggtcagctcaatctcggcatcgggcagctgtacgttgttggaaatcaccagcatgtaacacggtcctccggaagaagccctaggatacgcgaatgcaccttggccatcccctcaaacaacaaacccggcacaaggccgggtctgcttaacaacattgacgcttacttcaccgcggggaccgccatatccatggactgctgcgcccgcttgttcttgacccagtaacaaacgcccatgaacgccacccacaccgggatcgcgtacaccgagcggtcaatgcccggaatcatcaacatggtgcccaaaataaacaccacaaacgctacacagatgatgttgccatacgggtaccacagcgccttgaacagcggcacctggccggtgcggttcatgtgctggcggaacttgaagtgggagaagctgatcatcgcccagttgatcaccaacgtggccaccaccagcgacatcaacagttccagcgcgtcatggggcatcaggtagttcatcagcaccgccaccagggtgatcgccgccgaggccaggatcgaacgcaccggcacaccgcgcttgtcgatcttcgccagggccttgggcgcgtcgccttgctcggccatgcccaagagcatgcggctgttgcagtaggtgccgctgttgtacaccgacagcgcggccgtcagcaccacgaagttgagaatatgcgcggccgtgttactgcccagcatcgagaacacctgtacgaacgggctaccgctataggcatcgccggaggcgttgagggtcgccagcaggctgtcccacggggtgagcgacagcagtaccaccagggcaccgatgtagaaaatcaggatgcgatagatcacctgattgatcgccttggggatcacggtacgtggctggtcggcttcggcagcggtaaagccgagcatttccagaccgccgaaggagaacatgatgatcgccatggccatcaccaagccgccgacgccatgggggaagaaaccaccatgctcccacaggttgctgaccgaggcttgcgggccgccgctgccgctgacgagcaggtagctgcccagggcaatcatgccgacgatcgctaccaccttgatgatggcgaaccagaactcggcttcaccgaagactttgacgttggccaggttgatcgcgttgatcagcacgaagaacgccgccgccgagacccaggtcggaatctccggccaccagtagtgcacgtacttgccgacggccgtcagttccgacatacccaccagaatgtacagaatccagcagttccagcccgacagaaagccggcgaaaccgccccagtacttgtgggcaaagtggctgaaggagccggcgaccggctcctcgacaatcatttcgccaagctggcgcatgatcatgaaggcgataaagccgcagatggcatagcccaggatcatcgaagggccggcggatttgagcaccccggccgagcccaggaacaggccggtgccgatggcgccaccgagggcgatcaactggatatgccggtttttcaggccgcgtttcagctcgcctgaagaagaatggggtccactcatgaaaagggtctcacgcaaggtttgaagagttgaatgcaggttgctgccttgaattaccgactcaagcagcgccgctcaaaccccagcgcaggcaccaggagtacagcgtctttctaatggtcatgcgtcacctgtttgtttttatctgtgacgaaatcgaacccgtccggctcgtggccaggcggagtgatcagggggatcaaaccctgaggtcttggccttttgcgtgggtacgcaaggggggtcacagtaaaacgcggcgcattgtacaccgctcgacagcttcggcacgcaccgggaaagtgcacaggcaaatctgtcagctaatgcttacatcagcatgccccccagcaaagccagggcagttacgtaaatctatcgttacaccccggaaaatctgcgttacagccagactttgtaagccttcaacggaattctgtcggtaggcaacgtctgaagaatcgcttcagccaattcactgttttacctgaataaaaaaactcgacaaaaaacagaagaaaaaatccaaatgaaaccgtgtcaataaattttttgcatttcgaaacactctcttctaggttctttgcacttgcccacgaagcccgtgggtgagccgttctcaatcaacgtcctctaggaggtacaccatgcaagcattggaaaacgacctggaaaccgaactgcaactcgacgattggtttgaagcgccgacccatgaggccgccgttgaaatgatgcaagccgatgccgttgtgccttttggcactgcgatgtggcctttctaatacccggcaggcatccggcaggcgctgtgcacggcgcctgcccccttacccaaggcacagaaggacacccgtcatggacaaggcccgcgccgtcgaacattttctctactacctggcacaccaccccgccctcaacggcctgaaccgccccaccgtgttgctgggccacaccgagcgctatgacgccatcgcccaggcgattacccacggcagcgccgcccgcttcaactttcaactgcaacgcctggacctggcgcccagcgacaccctggcccaggccattcaaagctgcgacctgtacctgtttctctatgattcctccacgctgcccaacccacgcgccgaaggcccggactttatccgtgccctgcaaggcgtgatggccgagcactggaaaaaatccctgctgttcaaggattacggcgactatttctacgacaccttcagcgtcgagccccaacgcatcgccgacctcaacgccacactgatccggcgcatggcccaggccaacgtgctgagctttaccgacaaacacggttcgcgcctggaagcgccgatgagcagcatcaagaagtggaccaatatcaacggcgtcggcaaccacgacctggcgcccggcgaaatcgccacccacagcgaagccatcaacggccaggtgcggtttgtcggcaccttcctcagtaccatcccctttgcacgcaaatacggcgtgctgcaatcaccgctggagttatggatcgaaaactccaccgtttgcagcgtggccagtgatgtgccggggctggcggatgatttcaacaagtacctgaatgccaacccgtccaaccgtcgtgtggaggagttggggattggtaccaatgaaggggtcaaggacctgtatgcgcgcaatgccgggtttgaagagcgccattgcgggttgcacctgggcttgggtggcgggcagaaaggcagtcatcacctggacctgatctttgccagtggggtgctggcgctggatgacaagccggtgtttgatggcgcctttgccttttaaaaatccgtcagacgtatagagatccctgtgggagccgggcttgcccgcgatagcggtgggtcagttagcataaaggtggctgacccaccgctatcgcaggcaagccagctcccacagttgattgcatttcaaaggtagatcgcaaaaaaaacgccaaccctagggttggcgtttttgtgcagcgcttaacgcatcactgcggcttcttgcgaccaaaaccagggcgctggccggaaccggccggggcgccacggcgcttgcccgacggctcgtccgcgaccagtttcgggccagggcgcttgttcgccgctggcttggctggacgcttggtgctggcgttgtcggccgggcgatccgattcaccacggttgctacgaccacccgccggagcaggacgcggcgtacgtggcgcacgctcgccttcctgacgcgatggcgtggtggggcggcgttcaccttcaatgtgcggctgacgcgagatacgaccgccggtggccggtgcatccagcgcagggcgcagggtgcgggcaacacgttcggtacgtggcaccgggcgcgacgatttacgctgcatacgctcaagcttgtctttgctcttggcgttcatctgcggcatggcaaccggcgtcaggcccacttcggcgctgaggatatcgacttcgtactggctcatttcgcgccagcggcccatcggcaggtcggagttcaggaacaccgggccaaaacgcacgcgcttgaggcggctgaccaccaggccctgggactcccacaggcgacgcacttcacggttacggccttccatcaccacgcagtggtaccagtggttgaaaccttcgccacctggcgcctgcttgatgtcggtgaacttggccgggccgtcttcgagcaccacgcccgccttgaggcgttcgatcatctcgtcatcgacttcaccacgcacacgcacggcgtattcacggtccatctcgtaggacgggtgcatcaggcggttggccaactcaccgtcagtggtgaacatcagcaagccggtggtgttgatgtccaggcggccgatgttgatccagcggccttctttaggcttgggcatcttgtcgaacacggtcggacggccttccgggtcgtcacgggtgcagatctcgccgtcgggcttgttgtacatgatcacgcggcgcaccgattcggcggcctcttcacgcttgatgaccttgccatcaatagtgattgcatcgtgcaggtcgacgcgctggccgagggtggcctcgacgccgttgaccttgatgcgcttctgggtgatccaggcttcgacgtcgcggcgcgagcccacgccgatacgcgccagcaccttttgcagtttttcgcctgctgggccgatttcctggtctttctggtcttggtcattcatcgtaagcacctcccggtgggtcgattcaggcatggcctgaggggtattgaaagcggggccttggccgaataggtcggcaaggggtcgcgaatcatacgcgcatggcgcgtgttgcgcatcacagactagccgataacgcccagctcatttgcttttccgccgactggtggcccccagggccagcaatcgcagctcggcttcggccaataccgtgcgcttgtcggctttatcgagtttcttccaggcacggatttcacgcttgctgcggccacagccgacgcagatgtcgtcgttgaatttacagatgctgatgcacgggtctttcagggcactcatggtcgatcctctgtgggagctggcttgcctgcgatggcatcacctccttgcatctgagagaccgaggcgtctgcatcgcaggcaagccagctccaacatgggttgcgcggtgaacgtcagagccggtcagtcttcgagctggcggcgctcgttttcgatggcctcggccagcgcccgggcttcgtcttcttcgtcactcaggggcggctgttcgagggcggcgacggcggccaggagcttttcccgggcctgggccacgccaagcacatcgtcttcggcttcgacctcaggctcggattcaacgttcacctgggtttctggctccgccgcaccatcacgcagcaaatcgtcgaagtcggtcttgatcccctgctccatgtcgtccagttccagcaacagcgtatggaaactggtctcgtccttgggctcctccggctcggcgctggcgtcggccagttcctgcaggctttgcggcaccggcgcgtcgtcgaagtcgagcaccggctcggcttccatttcccgcagttcggccaggggcggcagatcgtcgaggtttttcaggttgaagtgatcgaggaacaccttggtggtggcgaacatcgccggtttgcccggcacatcacggtagccgacgatgcgaatccactcgcgctccagcagggtcttgacgatatggctgttcaccgccacgccacgcacgtcttcgatctcgccgcgggtgatgggctggcgataggcgatcagcgccatggtctccagcatcgcccgggaatatcgctgcgggcgctcttcccacaaccgcccgacccacggcgaaaacttctcacggatctgcaggcggtaacccgacgccacttcgcgcagttcaaaggcacggccctcgcaggacttgcgcaggatctccaaggccttcttgaagaccggcggctccgggcgttcggcttcttcaaaaagctcgaacaggcgctccaaagattgcggtttacccgaggccaggagaaaggcctccagcaaaggggccagttcgcggggttcagtcagattcatcgattcagctcgttattcggctcgcgcccgcacgtggatagccgcaaaaggctcattctgcaccagctcgaccaaggactccttgaccagctctaggatcgccataaaggtcaccaccacacccaggcgcccttcttcggcggtgaacaactcgacaaagggcacaaacccaccgcccttgagacgttccagcacatcgctcatgcgctcgcgggtggacagcgcttcacggctgacctggtggctctcaaacatatcaccacggcgtagcacctcggccatggacatcagcaattcttccaggctcacgtctggcagcaatttgcgcgcgcgcgcctcgggggcgtcgagcttgggcaccaccacatcacggcccacacggctcaggccgtcgatgccttcggcggcggccttgaagcgttcgtactcctgcaggcggcggatcaactcggcgcgtgggtcatcctcttcggcttccaccgtttccgagcgcggcagcagcatgcgcgacttgatctcggcgagcatggccgccatcaccaggtattcagcggccagttccaggcgcaccgactgcatcagctcgacatagcccatgtactggcgggtgatttctgccaccgggatgtcgaggatattgatgttctgcttgcggatcaggtacagcagcaagtccagcgggccttcgaaggcttcaaggaacacctccagggcgtccggcgggatgtacaggtccaggggcatttccatgaccgcctggccgtacaccatggcaaacggcagttcctgctgggcgccggcctgggggtcagcggtttccacggccgacattcaggcctcgaccatgaacggagccgggtcgccacaacccacacgcaccacttctggctcaccgtcggccaggttgatcaccgtggaggccttattgccgccgtagccgccgtcgatgatcaggtcgacgtgtttttccagcaatcggcgcatttcgtaagggtcgtacaacggctcggtttcgccgggcaggatcaacgacacgctcatcagcggttcgcccaactcggccagcagcgccagggcaatcgggtgttccggcacgcgcaggccgatggtgcgcttcttggggtgcagcaacaggcgcggcacttcgcgggtggcgttgagaatgaacgtgtagggccccggcgtgtgggccttgagcagacggaaggtgccggtgtcgaccttcgcaaacagcccaagctgggacaagtcgctgcagatcagcgcaaagttgtgcttgtcgtccagctggcgtaggcgccttacccgctcgaccgcgcccttgtcgccgatctggcagccaatggcgtatgacgaatccgtcgggtagatgactacaccaccggcacggatgatctctacggcctgcttgatcaggcgcgcttgagggttttccggatgaatctggaagaattgactcacgtgctctacctgttcagacggtggcaataatggggtcatgcttgaatcgcccccacaacagcggcagatcttccgggacctggcgatactcgccgatctcggaccagccgcctgggccatgaaagtcactgccggcactgaccagcagaccaaattcgcgggcaaggatcgccaggctgccgacctgttcggcgggttgatgcccgttgaccacctcgatggcgtggcctcccgctccaatatagtcgctgatcagcttgcggcgcttgctgcgggtgaaatcgtaatgccagggatgcgccaggctgacccaggccccggaggcccgcagggtctggacagtgtcttccagggtcggccaatgcagcttcacatcgcccaacttgccggcgcccagccatttgcgaaaggcctcggcgcgatcctttacatacccttcacgcaccatccagtcggcaaagtgcggacgggccggtgcgttgccgctgtcgcccagctcctgctggatggcgcgggcgccgtcgagggcacccggcatgcctttaaggctgagcttgcggcttatttcttcggaccgcagccagcggccatcgtgcaattgggcaatcgccgccaccaagggcggggccttttgatcaaaaccgtagcccagcacatggatggtggcgccgccccaggtgcaggacaattccacgccattgaccagctgcatgcccagggactgcgcggcctggcgggcttcgtcgaggccttcgagggtgtcgtggtcggtcaatgccaaaactcgcacgcctttttcaaacgcacgcgcaaccagtaccgcgggcgccagggcgccgtcggaggccgtgctgtggcagtgcaaatcaacattcacgggagtgtgtaacctcaagtcagctggcgctatcgcaaccaaggatgtttgttattatgccgccacatccagcttctggctcttactgtgaaacaattcatcgacttcatcccgctgttgctgtttttcatcgttaccaaactcgaccccagggtcatcgaaatcgccggccacgagttatcgttcgggggcatctacagcgccaccgccgtactgatcgtcagctcaatcctggtctacggcgccatcttcatctcccagcgcaagctggaaaaaagccaatggctcacccttatcgcctgcctggtattcggcggcctgaccttggccttccacagcgaaaccttccttaaatggaaagccccggtggtgaactggctgttcgccctggtgttcatcggcagccacttcatcggtgaccgcctgctgatcaagcggatcatgggccatgcgctgaccttgccggagccggtgtgggtacgcctgaacgtggcctggatcgtgtttttcctgttctgcggcgccgccaacctgttcgtggcgtttaccttccaggactactgggtcgacttcaaagtgttcggcagcctgggcatgaccgtattgtttttgatcggccagggtatctacctgtcgcgtcacctgcatgacaccgctgctaccacaccaaaaaccgaggactgacatgctctacgccatcattgccaccgacgttgccaactccctggaaaaacgcctgagcgtacgcccggcccatgtcgagcgcctcaaacagctgcaagccgaaggccgcatcgtactggccggcccgcacccggccgtcgacagcaatgacccgggcgacgccggtttcaccggaagcctgatcgtggccgagttcgcttccctggccgacgccgaggcctgggccaaggctgacccttacgttgcagcaggggtctacaccgatgtggtgatcaagccgttcaagcaagtcttgccttgagcccggctgcgtcgaacctaatcgtttcggcgtactcataatggctcacggcgtcaccggtggggccttcgccgccgacaatggctaaattgagtgagtcatgagcgagctgttactgatagatgatgaccaggagctctgtgagctgctgaccagttggttgagccaggaaggtttccaggtgcgcgcctgccacgacggcttgagcgcccgtaaagccttggccgagagtgcgcctgcggccgtggtgctcgacgtgatgttgcccgatggcagcggcctggagctgctcaagcaattgcgcaacgaccacccggagttgccggtgctgatgctctcggcccggggcgaacccctggaccgcatcctcggcctggaactgggcgccgacgactacctggccaagccctgcgacccgcgtgagctgacggcgcgcctgcgcgccgtattacgccgcagccacccagccgcggtgtccacccagctggaactgggcgacctgtgcttcagcccggtgcgcggcgtggtcagcatcgatgaacaggagttcgccctcaccgtctccgaaagccgcctgcttgaagcgctgctgcgccaacccggcgagcccctggacaaacaggaactggcgcagatcgccctgggccgcaagttgaccctctacgatcgcagcctggacatgcacgtcagcaacctgcgcaaaaagatcggcccacaccccgatggccggccacggatcgtggcgttgcgtagtcgtggttactactacagcctctaaacatcacgcttaaccctgtgggagctggcttgcctgcgatagccatagtaggtatctacacaattttgtaggttgcagcagccaacggtaaccacgatgcgaagcgagccgctcttgatcttgatctgcttgtgatcttgatctcaggcgccccgttaaaccacgctggccgaacgcaggcttgagtccgtgggccggagtgagggcacaccgagcccaagcgaggtgccgagtggtggggcaagagcgctttggttactttcgcgcttttcgaaagtgacccgctgtcagagcggaaccctaagtggccgttacctaaataacggatatgtacccggtccaactgcgttgactgttaggccgtcttcgcaggcaagccagctcccaccattgatttcatcaccttcaagggttttgtcagctcctgtcaaacccgtctttaccgaagctttaccctcccctgaccgccgctgaccttgctctgcgtaacctactcacatccggactcaccggaatagagacaggagatacaccatgcgcaagacccttatcgctttgatgttcgccaccgccctgcccaccgttgccatggcaatgccggaaggcccaggcccgatgggcgggcctgaaagccgcatgatgggtggcccaggccacggtgaacacggcccgcgtggcaaaggcggcccgttcagccagctggacttgagcaaggaacagcgcgagcagatccgcaagctgatgggtgaccaatggcacgcccgcaaagacctgacccaaaagtacctggacaaactcccggccgctgaccagaaagccatgcaggacgaaatcgccgccggcaagcagaaaacccaggccgatatccgtgccgtgctcaagcccgaccagcagaagaagtacgacgaaatcgtcaagaagcaagccgagcgccgcgccgaatggaaagagttccaggcctggaaagcccagcaagcgcaaaaagcgcaataatggcctagcttcacccccagcccagtggttcgcgccgctgggcttttcctgtttgagggtttcctgtgcgttcattgttctggcgtatcctggcgagtttctggctggccatcgccctggttgccgggttatcgatcctgcttgggcacatgctcaaccaggacgcctggattctcagccgccaccctgggctcaacaacctggcccaagagtggacgcagctctacgaaagccagggcgaagatgccgcccaggacttgttgcagcagcgcaaacgccagtaccacatcgacgtgcaagtgcttaacgaaagcggcgacccggtggtgcgcggcaccttcccgcgccgcgccgccgcgttcgaagcccgccagaacgacagccaggacggccacctgccctggcggcgcctgaccgccgagtacaccagcgccaaaaccggcgatacctatctgctgatttaccgtattcctcacccggagctggacgcctggcaccgcagcagcctgctgtggccgctcagtgcattggcgattaccctggtggtgctgaccctgttcagcctgctggtgaccttgtccatcacccgcccactcagccgtttgcgcggcgcggtgcatgacctggggcaaaccacttatcaacagaacagcctggcgcaactggccaatcggcgcgacgagttcggcgtgctggccaacgacttcaaccgcatgggcgcgcgcctgcaaagcctgatcggcagccagcgccagttgctgcgcgacgtctcccacgaactgcgctcccccctggcgcgcttgcgtatcgccctggccctggccgaacgcgccagccccgaagaacgggaaaaactctggccacgcctgacccgcgaatgcgatcgcctggaagccttgatcagcgagatcctggtattggcacgggtcgacgccgacaacgccagcgccgaagacatcgatctaaacccgttgctcagggctctgcaaaaggacgcccaactcagtgcccctgagcaagtggtgcaactgacgactgccaatgatttacagcttaaaggctggccgaccatgatcgaacgcgccgtggacaacctgctgcgcaatgcccagcgcttcaacccggtgggcgagccgattgaattgcaggcccagcatcaaggcgggcgcattctgatcagcgtacgcgaccacggccccggcgttgaagccgagcacctgagccaattgggcgagccgttctaccgtgcgccgggccagaccgcccaaggccatggcctgggcctggccatcgcccgtcgcgccgccgagcgccatggcggcaacctgatcctggccaaccatcccgagggcggttttatcgccagcatcgaactgcccttgatccctggggttgccataccagtgggatgatcttctatagtggcccttctcttacggagggcctttgatgactgacctgctgactcccatccaagccgcactcgctttaccgcacgccccattgccccagccccaggccggcgccctgccttcgacctttgccgtgactgacctggcggccgccagcatcggcgccgccggccaggccgtcgcgcagttgattgagcaacaaaccgggcgcctgcccagcgtcagcgtggatcggcgcctggcctcgttgtggttctcctcgtcgattcgccccgtgggttggcaagtgccgcctttgtgggacccggtagcgggtgattacgccagcgtcgatggctggattcgcttgcacaccaacgcgccccatcatcgggcagcggccgagcgggtattggggcctgtcgctgatcgcgcagcaatggccaacaaagtcgcaacctggaaagccgccgaactggaaccggcggtggtcgatgcgggcggttgtgcggcgcagatgcgtagctggcaagcctggcagcagcacccccagggcttggcggtaaatgccgagacgttgattcagcgcgaggccttcgaccccggcatcgacacaccctggctcggctcagccgctcgcccactggctggcatcaaggtgctggatttgacccgggtgctggccggtccggtggccagtcgtttcctcgcaggcttgggtgccgacgtactgcgcatcgactcacccacctggaacgaacctggcgtcgtcccggaaatgaccctgggtaaacgctgcgctcgccttgatctaaagcgccacgacgaccggcaggtgtttgaagcgttgctcaaggacgccgacattctgtttcacggttaccgcgccgatgcccttgagcaactgggttatacccttggcgaacggcagcacctcgcccccggcctgatcgacgtcagcctcaacgcctacggctggagcggcccatggcgtaatcgtcgtggctttgacagcctggtgcagatgagcagcgggattgccgaggccggcatggcctggaaacagacggataaaccgctgccgctgccggtgcaggcgctggatcacgctaccggctacttgatggccgccagtgcgatccgggcgttggccgagcgcctggactccggacgcggcggttcggcgcgcttgtcgttggcgcgcacggcgaagttgctggtggaggccgggcaagtgccacagcaagcggcattgcgtgaggaagacatcaatgaccaaggcctggtcgtggagcagacagcctggggccaggcccatcgactgctggcgccgctaagcatcagtggcacgccgttgcagtgggatttaccggcggtggagttagggtcacaccggcctcagtggtgacctgggcaccgctatcgcaggcaagccagctcccacaggatcagtgtgggagccgggcttgcccgcgatggggccatcaccgtcgctatcaatccccgcggttcaacgacgtccacaaatgctgcgccgcatacgccctcaacggccgccacgcctcggcccgcgccaataactgccgcgccgacaccggcccaccttccaacgctgccaaagcattgatcagcccgatatcccccgacgcaaatgcatccacctcgcgcaactggcgcatggcgatgtactgcgcggtccactctccaatccccggcaacgcaaccagccgtgcaacgccgtcctggaggctggccttgggttcgaaaagctgtgggtcatccaacagcgcctgggccacaccagacaaggtacgcccccgcgccttgggcatgcccagggtggccaggtccgccgccgccagcacttcaggtgtcggaaacaggtgggtgataccggcgtgcggggttgacagcgcctgaccatactgcgccaccaacttgcccgccaggcgaatcgccgccaccacggtgatctgctgacccagcaccgcacgaatcgccagctccaacccatcccaggtgccaggcagccgcaggccaggacgggccgcaaccagttgcgccatcagggggtcctgcgccaattgcgcgttgattacctcaggcacggcatccagatcaaacatcctgcgcaagcgccgctcgatctcaggcatggcgccaggctcgggaaagtcgaccgtcacctccagccaatcccccgcccccggttcgacgctgatccagccatgtatccctgccacactgatgctgcgtcggtacacgccagcgaccacggtttccaacccggtaatcgctcgcaccgataagaaccccagcatcgccgcccagtcgtagggcggttgatacgccaacctcacagtgacaataccccgctatacagcccatacgcggccaacccggcgcccgcgatcacgccgctgaaaatgcctttttccacggtggtaaacaacggctggccctgctcgcgcttggccagggcaaacaggatcacgcccggtgcgtacagcaacgccgacagcagcaagtacttcaagccccccgcatacagcagccaaatcgcgtaaccgagggcaatcagccccaccagcagatctttcatgcgccggcgctgccagccggcataggtttcgccgcgcgcgctcaatagcaccgcataggccgccgaccacaagtaaggcaccaggatcatcgacgacgccaggtagatcagggtggtgtaggtgctggctgaaaagagcgtgatcaccaggaatgcctggatcatcacgttggtcagccataaggcattgaccggcacctgattggcgttttccttcttcaggaacgccggcatggtcttgtcctgggcggtggcataaaggatttccgcgcacagcagcgcccaggagagcaacgccccgagcagcgaaaccgccaggccgatactgatcaataccgcgccccaaggcccgacgacatgctccaacacaccggccagggacgggttctgcaactgcgccagctccggctggctcatgatgcccagggacagcacgttcaccagcaccagcaaggccagcacgcccacgaagccaatcactgtggcgcgccccacgtccgagcgtttctgtgcccgtgccgagtacacactagcgccttcgatgccgataaagacaaacaccgtgaccagcatcatgtggcgcacctgctcgaccacgctgcccatctgcgggttacccaggccccagatatcgcgagtgaagatatccgccttgaatgcaaccgcagcgatcacgataaacatcagcagcggcacaatcttcgccaccgtcgttacctgattgatgaacgccgcctctttgatcccgcgcatcaccagaaaatgcaccgcccacagcagcagcgaggcgcagccgatggccagcggcgtattgccctggccgaacgccggaaaaaagtagccgagggtgctgaacagcaagacgaaataaccgacgttgcccatccacgcactgatccagtaaccccaggcggatgaaaaacccatgtagtcgccgaaccctgccttggcgtacgcatataccccggaatccagctcgggcttacggttcgccaacgtctggaacacaaaggctagggtcagcatgccgatagcggtgattgcccagccgatcagtatggcgcccacctcggcacgggcggccatgttctgcggcaatgaaaagatgccgccgccaatcatcgagcccaccaccagggcgatcagggcactgagccggagtttctgggcgggttgggtcatgcaggttcctcgaaataaacggttgggtgacaactgcgcacgcaagtaattcaaattaataacgttgtcataacataaggatatgtaaaggcacgaagtttaggcttatttagaatttaaatacgtcaattatgaagcgatagtcaaacaacgtacaaaaaatttgcacattcgcaaatacgaactagcgtcaacacccatgccccaaccaattgattaaccataaagcagagagcgctctacccagcgtctttgcgggattttttcgcccgcaaaatctcaccctaagtcgttaattcacaatggaatgtgccaatgaagtgatctgagtcagctgtttgattagcgcacggaattattctgtggtctctcttctcctgcattggagtcatgcaatgtctgaaactcccggaaaacttcgattaggcgccctggtcgcacttgtcgtcggctcgatgattggcggcggcatcttttcattgccgcaaaacatggccgccagcgccgatgtcggtgcggtgttgattggctgggtgattaccgccatcggtatgttgaccctcgccttcgtgttccagaccctcgccaaccgcaaacccgacctcgacggcggggtatacgcctacgccaaggccggtttcggcgactacatgggcttttcatccgcctggggctactggatcagcgcctggctgggcaacgtcggctacttcgtcttgctgttcagcaccctgggctacttcttcccggtctttggcgaaggcaacaccccgacggcggtgatcgctgcgtcagtgctgttgtgggccgtgcatttcctggtgctgcgcgggatcaaggaagccgcgttcatcaacctggtgaccaccgtcgccaaggtggtgccgctgctgctgttcgtgctcatcgcgctgttcgcgttcaagctggacatcttcaccgctgacatctggggcgtgaaaaacccggacctgggcagcgtgatgaaccaggtgcgcaacatgatgctggtcaccgtgtgggtgtttatcggcatcgaaggcgcgagcatcttctcgtcccgtgccgaaaaacgcagtgacgtgggcaaggccaccgtgatcggctttatcaccgtgctgctgttcctgatgctggtgaacgtgctgtccctggggatcatgacccaaccggaactggccaagctgcagaacccgtcgatggccgccgtgctggagcatgtggtgggccactggggtgcggtgctgatcagtgtgggcttgatcatctcgctgctcggcgcgctgctgtcttgggtgctgctgtgtgcggagatcatgttcgccgccgccaaagaccacaccatgccggagttcctgcgcaaggaaaacgccaatcatgtgccggtcaacgcactgtggctgaccaacgcaatggtgcagatattcctggtgatcacgctgttttccgccagcacctacctgtcgctgatctaccttgccacctcgatgattctggtgccttacctgtggtcggcggcctatgccctgctgctggcggtgcgcggcgagacctacgagaacgccctcaaagagcgcaagaaagacctgttcatcggcgccatcgccctgatctatgcgatctggctgctgtatgccggcggcaccaaatacctgctgctctccgccctgctctacgcccccggcgcgatcctgttcgccaaggccaagcgtgaactgggcaaaccgattttcacccccgtcgagaagctgattttcgccgcagtggtcattggcgccctggtggcggcctatgggctctacgacggcttcctgaccctgtaattgttgttcactggaggatctgtaatgaccacggaaaaagtgaagtacggcgtacattccgaagccggcaaactgcgcaaagtcatggtgtgctccccaggtttggcccaccagcggctgacccccaacaactgcgacgagctgctgttcgatgacgtgctatgggtggcccaggccaagcgcgaccacttcgacttcgtcaccaagatgcgcgagcgggacattgatgtgctggaaatgcacaacctgctcaccgacatcgtcgccaaccccgaagcgctggactggatcctggagcgcaagatcaccgccaacaccgtaggcctgggcctggtcgatgaagttggctcgtggctgcgcagcctggagccgcgcaaaatcagtgagtacctgattggcggcgtatcggccgacgacctgccgagcagcttcggtggcaagaccatcgagatgttccgcgattttctcggccacgccagcttcatcctgccgccgctgcccaacacccagttcacccgcgacaccacctgctggatctacggcggcgtgacgctcaacccgatgtactggccggcgcgacgtcaggaaaccctgctgaccagcgccatctataaattccaccctgagttcaccaacgcggacttccagatctggtacggcgaccccgaccaggaacatggcgccgcgacgctggaaggcggcgacgtgatgccgattggcaatggcgtggtgttgatcggcatgggtgagcgctcctcccaccaggccatcggccaactggcgcgcaacctgttccagaacaaagccgtggaacgcgtcatcgttgccggcctgcccaaatcccgcgccgcgatgcacctggacaccgtgttcagcttctgcgaccgcgacctggtcaccgtcttccccgaagtggtcaaccagatcgtgccgttcaccctgcgccctgacgagagcaagccccacggcatcgacattcagcgcgaaaaaaccaacttcctcgaaaccgtggccgcagccctcaacctcaaggccctgcgcgtggtcgagaccggcggcaacagcttcgccgccgaacgcgagcaatgggatgacggcaacaacgtggtggccgtggagccgggcgtggtgattggctacgaccgcaacacctacaccaacaccttgctgcgcaaagccggtgtggaagtcatcaccatcagcgccggtgaactcggccgtggccgtggcggcggccactgcatgacctgcccgatcatccgcgaccctatcgactattaaggagattccatcatggctttcaatatgcgcaaccgcagcctgctgtcgctgatgcaccacactacccgcgagctgcattacctgctggacctgtcccgcgacctcaagcgtgccaaatacaccggcaccgagcgcccgcacttgcagggcaagaacatcgcgctgatcttcgaaaaaacctcgacccgcactcgctgtgccttcgaagtcgcggcccatgaccaaggcgcccacgtcacctatatcgacccggtgtcgtcgcagatcggccacaaagaaagcatgaaagacaccgcccgcgtattgggccggatgttcgatgccattgaataccgtggctttgaacaggaaatcgtcgaagagctggccaagtttgcgggcgtgccggtgttcaacggcctcaccgccgaattccacccgacccagatgatcgccgacaccctgaccatgcgcgaacacagcgacaagccgctgcatgacatcagctacgcgtacctgggggacgcgcgctacaacatgggcaactcgctgctgatgatcggcgccaagctcggcatggacgtgcgcatcggcgcgccgaaagcgctgtggccccatgaagatttcatcaaagagtgccaggcctttgccgaggaaagcggcgcacgcatcaccatcaccgaagaccctgcagaggccgtgaagggcgtggacttcatccacaccgatatctgggtgtccatgggcgaaccggtggaagcgtgggacgagcgcatcgagcaactgctgccgtaccaggtcaacgccaagatgatgaaagcctcgggcaaccctcgggtgaaattcatgcattgcctgccggcgttccacaacagtgaaaccaaggtcggcaaggacatcgcagcgcgctatccgcacctggccaatggcgtggaagtgaccgaagaggtgtttgagtcgccggccaatatcgccttcgagcaggcggaaaaccgcatgcataccatcaaggcgattctggtgtcggcgttggcggatatctaaccccactctgatcgttcccacgctccgcgtgggaatgcagccagtggcgctctgcgccacaagagcggacgcagagcgtccggtggggcattcccacgcagagcgtgggaacgatcattctagaaggacattctgtatgcgcatcgtcgtagccctgggcggcaacgccctcctgcgtcgtggtgaacccatgaccgcagacaatcaacgggccaatatccgtatcgccaccgaacagatcgccaagatccaccccggcaacgagctggtgatcgcccacggcaatggcccgcaagtgggcctgctgtcattgcaggcagcggcctacaccagcgtctcgccttacccgctggacgtgctgggcgccgagaccgagggcatgatcggctacatcatcgaacaggaactgggcaacctgctggactttgaagtgccattcgccaccctgctcacccaagtggaagtggacgccaaggacccggccttccagaaccccaccaagcctatcggccctgtgtaccccaaagccgaagccgagaagctcgccgccgaaaaaggttgggccatcgcgcccgacggcgacaaataccgccgtgtagtcgccagcccgcgtcccaaacgcatctttgaaattcgcccgatcaagtggctgctggagaaaaaagccatcgtgatctgcgccggtggtggcggcatccccaccatgtatggcgaagacggcaagctgcgcggcattgaagcggtgatcgacaaagacttgtgttcttccttgctggccacgcaactggaggccgatttgctggtcatcgccaccgacgtcaacgccgcctttatcgacttcggcaagccaacccagaaggccatcagccaggcccaccccgacgatatggaaaaactcggcttcgccgccggctccatgggccccaaggtccaagccgcctgcgagttcgcccgccagactggcaaaaccgcggtgatcggttcactctcggacatcgaagccatcgtccagggcagcgccggcacgcgcatcagcacggccaaacctggcatcacctacctgtgaagttaaggagaaacgcctatggctatctttgaacccggccacctgcatatcgagcgacacgcgctgaacaaggacgatgtcagctacgacctgtgcctggactacgaagtcttcacgcatgagcgcgaaggcaaaggcatgcagttcaccctgcatgggagcattcagggcaaggacatgaaggaaacctttttcctgcccaaggaccaggcctacaacttcgccagcaatgtgactaagattgttgaaaagtacggcattcccaagacccatagcagcgttggttcacaacacaagcattacgatctgatgtttgaggatgtgcgccagcagttggatatgaaatccggcgacccggtcaaacccgaacatctggaataacctgcccccaatcgaatgtgggagctggcttgcctgcgatagcgacctgtcagacgatattctcggtaactgacccaccgccatcgcaggcaagccagctcccacattttgatctccaccggctccaaggcatactggccaccctcggcactccagaatcaagatccgccccatgcgtatccacgtcagcttcatcgaccgcgtcggcatcacccaggaagtcctggccttgctcggtgggcgcaatctcaatctggatgcggtggaaatggtgccgcccaacgtctatatcgacgcaccaaccctcagcgccgacgtgctcgaagagctgcgcgacgcgttgttcagcgtacacggcgtgcaagcggtaaaggtggtcgacattcttccgggccagcgccgccacttgcaactcgacgccctgctggcggccatgaccgacccggtactggccctggacagcgccggcaagatcctgctggccaacccggcattgatcgccttgtacggccgtgaaccagccggcgaaagcatcaccgagctgttcgatgacgcggccttgctggagaccctgctggagcagggctttcgattgccgctgcgcgagatcagcgtgaacggccagaccttgctactgggcgccacgccgatcaccgacgccggcgccctgctcaccctttaccaacccaaccgcatcggcgaacaactgtctgcgctgcaccatgaccatgccgaagggtttgatgcgctgctgggcgagtcgccagcgatccgcacgctcaaggcacgggcgcaacgggtggcggcgctggatgcaccgctgctgatccagggcgaaaccggcaccggcaaagagctggtggcccgcgcctgccacgccatcagtgcgcgtcacagtgcgccgtttctggcattgaactgcgcggcactgccggaaaatctcgccgaaagtgaattgttcggctatgcgcctggcgcctttaccggcgcgcaacgcggtggcaaaccggggctgatggagctggccaaccagggcacggtatttctcgatgagatcggtgagatgtcgccgtacctgcaagccaaactgctgcgctttctcaacgacggcagctttcgccgcgtcggtggcgaccgcgaggtgaaggtcaatgtgcgcatcctcagcgccacccaccgcgacctggaaaagatggtcagcgaaggcacctttcgcgaagacctgttctaccgcctcaacgtgctcaacgtcgccgtgccgcccttgcgtgaacgcggccaggacatcctgctgctggcgcgctacttcatgcagcaagcctgcgcgcagatccagcgcccggtctgccgcctggcgccgggtacctatcctgccctgctcggaaaccactggccgggcaacgtgcggcagttgcaaaacgtgattttccgcgctgccgccatctgcgaaagcagccttgtggacatcggcgacctggacatcgccggcacctccgtggcgcgccagagcgatggcgaagtcgacagcctggaacaggccgtggaagatttcgagcgcagcctgctggaaagcctctacagccgctacccctcgacccgccaactggccagccgcttgcaaacctcccacacggcgatcgcccaccgcctgcgcaagtacggcattcccaacaagccctgacggaataaacgcggttcaactgtgggagctggcttgcctgcgatagcggtgggtcatccagctccttagtgacgggtagaccgccatcgcaggcaagccagctcccacaaaggggcaatccagatttggtctgggaacgacattcagtgtactgaaagcgctacagcgtaacgatatcgctacaaccctgctttttgcgcgccatgcaaggctttgatccacataggctttttttcacgcacccggctgtagcgaaaacgctacagtcgcgcgacataacctcataaccaattttattaacttactgatttataaagacttattaaccttggccgcgatattgctaagcaactccccattattccaatcccgtccaccagacgattctggccctgaggagtttccatgagcgagttgcgtttcactgaagatcacgaatggctgcgcgccgaagccgatggcagcgtcaccgtgggtatcaccgcgtttgcgcagaacgcgctgggtgatgtggttttcgtgcaactgccggagttgcaggcttacgaaaagggcgccgaagcctccaccgttgagtcggtaaaagccgccagtggtgtgtacatgccgttggacggtgaagtcctcgaagtcaacgacaagctcgatggcagccccgaactggtcaacgaagacccgatgggcgaaggctggttcttccgctttaaacccgccgatgccgatgcagtggctaagctgttggatcaggatgcgtacgaccgtctgatcaaagccaacgctgaagcctgaggagcgcgccatgaccgttaatctgaccaccgccaacgaattcatcgcccgccacatcggcccgcgccaggaagatgagcagcaaatgctcgccagcctagggtttgattccctcgaagcgctaagcgccagcgtgatcccggaaagcatcaagggcaccagcgtactcggcctggaagacggcctgagcgaagcccaggccctggccaagatcaaggccatcgccagccagaaccaactgttcaagacctacatcggccagggctattacaactgccacacgccgtcgccgatcctgcgcaacctgctggaaaacccggcctggtacaccgcctacacgccgtatcaacccgagatttcccaaggccgcctggaagccctgctgaacttccagaccctgatcagcgacctcaccggcctgccgattgccaacgcctccctgcttgacgaagccaccgccgctgctgaagccatgaccttctgcaagcgcctgagcaagaacaaaggcagccacgcgttcttcgcgtcggtgcacagccacccgcaaaccctcgacgtattgcgcacccgtgctgaacctttgggcatcgatgtggtggtcggcgatgagcgtgaactgaccgacgtcagcccgttcttcggcgcgctgctgcaatacccggccagcaacggcgacgtgttcgactatcgcgaactgaccgaacgcttccacgccgccaacgcactggtcgccgtggccgccgacctgatggccctgaccctgctgacgccgccgggcgaattcggcgccgacgtggccattggcagcgcacaacgctttggcgtgccactgggcttcggtggcccacacgccgcgtacttctccaccaaggatgcgttcaagcgcgacatgccaggccgtctggtcggtgtgtcggtagaccgcttcggcaagccggccctgcgcctggccatgcagacccgcgagcaacatatccgccgcgagaaagccaccagcaacatctgcaccgcccaagtgctgctggccaacatcgccagcatgtacgccgtgtaccacggccccaaaggcctgacccagatcgcccagcgcattcaccagctgaccgcgatcctggccaagggcttgacggccctgggccagaacgtcgagcaggcacacttcttcgacaccctgacaatccacaccggcgctcacactgccgccctgcacgacaaggcccgcgcccagcgcatcaacctgcgtgtagtagacggcgagcgcgttggcttgtcggtcgacgaaaccaccacccaggccgatattgaggccttgtgggcgatcttcgccgacggcaaaaacctgccggcctttgctgccaccgacagcaccctgccgagcgcattgctgcgccaatcgccgatcctcagccacccggtcttcaaccgttaccactcggaaaccgagctgatgcgctacctgcgcaagctggccgacaaagacctggccctggaccgcaccatgatcccgctgggctcgtgcaccatgaagctcaacgccgccagcgaaatgatcccggtgacctgggccgaattcggtgccctgcacccattcgcccccgctgcgcaaagcgccggctaccagcaactgaccagcgaactggaagccatgctctgcgcggccaccggttatgacgcgatctccctgcagccgaacgccggctcccaaggtgagtacgcgggcctgttggccatccgcgcctatcaccagagccgtggcgaagcacgtcgcgacatctgcctgatcccgtcatcagcccacggcaccaaccctgcgaccgccaacatggccggcatgcgcgtagtggtgaccgcttgcgatgcacgcggcaacgtcgacatcgaagacctgcgcgccaaggccatcgagcaccgcgaacaccttgccgcgctgatgatcacctacccgtccacccacggtgtgtttgaggaaggtatccgcgaaatctgcgggatcattcatgacaacggcggccaggtgtacatcgacggcgccaacatgaacgcgatggtcggcctgtgcgcaccgggcaagttcggcggcgacgtgtcccacctgaacctgcacaagaccttctgcattccccacggcggtggcggcccaggcgttggcccgattggcgtcaagtcgcacctcacgccattcctgcccggccacgcggccatggagcgcaaagagggcgcggtgtgcgccgcgccgttcggcagcgcgagcattttgccgatcacctggatgtacatcagcatgatgggcggcgccggcctcaagcgcgcgtcgcagttggcgatcctgaatgccaactacatttcccgccgcctggaagagcactacccggtgctgtacaccggcagcaatggcctggtagcccacgaatgcatcctggatttgcgcccgttgaaagacagcagcggcatcagcgtggacgacgtggccaagcgcctgatcgattttggtttccacgcgccgaccatgtcgttcccggtggccggcaccttgatgatcgagccgaccgaaagtgaatccaaggaagaactggaccgcttctgcgacgccatgatcgccatccgcgaagaaatccgcgcggtagaaaacggcaccctcgacaaagacgacaacccgctcaagaacgcgccgcacacggcagcggaactggtgggcgaatggagccacccttacagccgtgaacaagcggtgtacccggtggcgtcgttgatcgaaggcaagtactggccgccggttggccgggtcgacaacgtgtttggcgatcgcaacctggtgtgtgcgtgcccttctatcgagagctacgcctgatctgacgggagatacgcggccagtgtgggagctggcttgcctgcgatagcggtgtatcagccgacagtgatgttgtctgacccaccgctatcgcgggcaagcccggctcccacattggccgagtccacctcagaaaataataagaaaccggagaacaaccatgtcccttagcgtgttcgacctgttcaagattggcatcggcccctccagttcccacaccgtcggcccgatgcgtgccgccgctcgattcgtcgaggggctcaagcgtgacaacctgttggaggctaccaccggcatcaaggtggaactctacgggtcgctgggcgccaccggcaaaggccacggcagcgacaaggccgtgttgctggggctggaaggcgaacacccggacaccgtgaataccgaaaccgtggctgcacgcctggcgcagatgcgcagtgacgggcgcctcaacctgctcggcgaacacagcattgcgttcaacgagaaagaacacctggcgatgattcgcaagccccttgcctaccatcccaatggcatgatttttcgtgcctttgacgccgtcggcatccagatccgcagccgcgagtattactcggtcggtggcggtttcgtggtggatgaagacgcggcgggcgccgaccgtatcgtcgaagacgccacgcccctgaccttcccgttcaaacacgccaaggacttgctcggccattgcaccacctatggcctgtctatcagccaggtgatgctgaccaatgaaagcgcctggcgcccggaagcggaaacccgcagcgggttgttgaagatctggcaggtgatgcaggactgcgtcgatgccggctgccgcaacgaaggcatcttgcccggaggcttgaaggtcaagcgccgggcagcggccttgcaccggcagttgtgcaagaaccccgagtcggcgctgcgcgacccgctctcagtgctggactgggtcaacctgtatgcgctggcggtcaacgaagaaaacgccaatggcgggcgcgtggtcaccgcgcccaccaacggtgcggccgggatcattcccgccgtgctgcattactacatgcgttttatccccggcgcgaacgaagacggcgtggtgcgctttttgctcaccgccgccgccatcggcattttgtacaaggaaaacgcttcgatctcaggcgccgaagtcgggtgccagggcgaagtcggcgtggcctgttccatggccgcaggcgcactctgcgaagtgctgggcggcagcgtgtcccaagtggaaaacgccgccgagatcggcatggaacacaacctcggcctgacctgcgacccgattggcgggctggtgcaggtgccgtgcatcgagcgcaatgccatgggctcggtgaaggcgatcaatgcggtgcgcatggccctgcgtggcgacgggcaacactttgtgtccctcgacaaggtcatccgcaccatgcgccagaccggcgccgacatgaaaagcaaatacaaggaaaccgcccgtggcggtttggcggtcaacattatcgagtgctgacgcccacaagcgcgtcggcacgtttttcaggagctgaatatgtccaccgaaaccctgttgaaaactcctctgcacgccctgcacctggaactgggcgcacgcatggtgcccttcgccggctacgacatgccggtgcagtaccccttgggcgtgatgaaagaacacctgcacacccgtgaacaggccgggttgtttgacgtgtcccacatgggccagatccgcctcaccggcgcgaatgccgccaaggccctggaaaccctggtgcccgtcgatatcatcgacctgccggtgggcatgcagcgctatgcgatgttcaccaacgagcaaggcggcatcctcgacgacctgatggtcgccaacctgggcaacgacgagttgttcctggtggtcaacgccgcctgcaaggaccaggacctggcgcacctgcgcacacatatcggcgaccaatgcaccatcgaaccgctgttcgaagaacgcgccctgctggccctgcaaggcccggcggcagtgaaagtattggcgcgcctggcccctgaagtcacccagatgaccttcatgcaatttgccaccctgcgtttgctgggcgtggactgctacgtcagccgctccggctacaccggcgaagacggctttgaaatctccgtgccggcggccaatgccgagagcctggcccgcagcctgctggccgaaaccgaagtgcaggccatcggcctgggcgcccgcgattcgctgcgcctggaagccggcctatgcctgtacggccacgacatgaacaccgacaccacgccaattgaagccagcctgctgtgggcgatctccaaggcccggcgtgccgatggcgcgcgggctggcggcttccccggcgccgaccgcatcttcacccagcagcaaaccggtgtggcccgcaaacgcataggcctgctgccgcaggagcgtaccccggtgcgtgaaggcgcagaaatcgtcgatgcccagggcaccgtgatcggcagcgtctgcagcggcggcttcggccccaccttgggcggcccgctggcgatgggttacctggacagcgcatttgtcgcattggataccgaagtttgcgcaatggtacgtgggaaaaaggtgccactacgtgtaagtaaaatgccattcgtcccgcaacgttactaccgcggttgattgactgtttctataagtaacgcggttgcgttgacgcgcactaaactgtaacgcaaccgccataaaacagtgcattcacgataggcatttttatagctgacgccctataacaagtgaataactctatcgaataagtcggtatcagaacattcaacaaagtgtcatgagacccagcaaaatcggggcctgccccagggcttgtttttttcatattagttggcgtagagttcctccactgtgtttgcatgggtcgcttggaacctggacctgggcagtagctgaagtagttgctacaacccgttcgacgtctcttaactttcctgcaacccagcccagtactctttcgtttgaaaggggctgtcattaatttttagcgtcaaaggaaagaagaaaatgtcggataaaggtggacgtcagagcggtaccgtcaagtggttcaacgacgaaaaaggctttggttttatcactcctgaaagcggcccggatctgttcgtgcatttccgcgctattcagggcaacggcttcaaaagcctgaaggaaggccagaaggtcaccttcgtttcagttcaaggccagaaaggcctgcaggctgacgaagtccaagcagaaggctgatccttcctgcgacaaaaagcccctgatatgacatcaggggcttttttatgggcgccattgcgtaaactgcgtgctttctccagagagccctgccatgtccaaacccctgttgagcccccagggcgaattccccgccgttggcctgggccgtcgcctggcagcgatgttctacgacttcctgttgtgcaccgccctgctgatcgtcacggcgtttatctacaagctggtatggatcgccttcgtgggcgaagcaaagatgcgcacactcaccgagtccggcgcgctggacggtgacccgttgctgtcgacgatcctgttgtttgtgctgtttgggttcttcgccaagttctggacccattcggggcaaaccctgggcatgcaggtgtggggcgtgcgcgtgcagaacgctgacggctcgcggatcagcctgtggcaggcattgttgcgttttgtggtgtcgattgcgtcatggctgtgtgtgggactggggtttatctggtcgttgttcgataaacacaaacgcagctggcatgacatctattcggatacgcaactggtgcggatcccgaagccaaagaaataactcagatgtgggagctggcttgcctgcgatagcggtcttgcagtcaaaacacctgtgactgttacaccgctatcgnnnnnnnnnnnnnnnnnnnnnnnnnnnnnnnnnnnnnnnnagtcacaggtgttttgactgcaagaccgctatcgcaggcaagccagctcccacattttgatttttgctcagcctgaggatcaggcgttgccggccagtttcaaccgtgcagcctgggtaaagtccaacatacgcttgagcggccgtaccgcctgcggaatcaccgccggttccacgaagatctcattactgccctcacgcaaacactgcagcgtacgctccagcgtattcattgccatccaggggcagtgcgcgcaactgcggcaggctgcgccgttaccggcagtgggcgcttcgacgaagactttgtccgggcacaactgctgcatcttgtagaagatgccgcgatcagtcgccacgataaaggtcttgttcggcaagcgttgcgccgcagcgatcagttggctggtggaacccaccgcgtccgccagttcgatcaccgaagtcggtgactccgggtgcaccaggatcgccgcatccgggtacagtgccttcatgtcttcaagctgtttggacttgaactcttcgtggacgatgcaggcaccgtcccacagcagcatgtcggcaccggtctgacgctggatgtaggtacccaggtgtttgtccgggccccagataatggtctcgccgttgtccatcaggctctcgacaatttccagcgcgcagctggaagtcaccacccaatccgcccgggctttgaccgccgccgaggtgttggcatacaccaccacggtgcgctcggggtgttgatcgcagaacgcagaaaactcatccacggggcaacccaggtccagggagcaggtggcttccagggtcggcatcaggatgcgtttttccggcgtgaggatcttggcggtctcgcccatgaagcgcacgccagccaccagtacggtcttggctgggtgggcggcgccgaagcgcgccatctccagggagtcggaaacacagccaccggtttcttcggccagggcctgaatcaccgggtcgcaataaaagtgggcaaccagcactgcgtcctgagccttgagctcggcggcaatggcggttcgcaggctcgcctcttcggcagcgctgagcaccttgggctgcttggcgtcgaggtgggcttgaaccagtaggcgttcggaaatgtgcgtcatgttcgcaagacctgcaggcgcagtagcgcgaaagtcgagtgtaccaccggctccggagcccttcgggcgccgccggacgaagtgtttttgttcatcaagcacgggtaaagctaaagctgcgcaaggctacagaatatccaatggattcaaaagcctaatctggtgacccgacaatggctcaatccctggccgtgacacgccgattaggtgacgcccgcacaacaatcaaaactgcccctccccctctcccacctccgaaaaatcaggaatatcaggccctcccactccgacacgcactaattttgtgcattaacacacttaattacgcgatttttcttacgtcttgtgtaataaatcctacaacgatgtaacaaaccgtcgaccactcactcaagtagggcaattaccgctgagttcaacgctggctcagacggtatggatcgtgtgtatttctacgttaaggatgtcgagtgccaaacctgctctcaaccggacacttgtgttgtacccggaacctgggcatcgccctgctctgcttgtgggcgctgcccgtggctggcgccgaggcgccgcagccaggccaggaagccctgcgcttgcagcagcaacagcaacgcgacctgcagcaattacaactggagcagcgccaacgccagatgcaacgtggcagcttcggtacaccagcggtcacaccggccttgccaacagacatcgccaaggatgaacactgctggcccttgagcggtacgcgcctggccggggtcacgctgttcagccgtgcccagttgaataaacatatcgagccctacgtggcgccttgcatgggcgtcacgcagatcaaccgcctgctggccgagatcacccggctgtatgtcgaggccggttatattgccagccgcccctacctgatcagtgcgcccgccgccgggcaaccgctggatattcacgttgaagaaggttacctggaagccatcgaactggccgaccagagcctgccggtttcattaggcggggcattccccggaatgctcggcaaaccactgaacctgcgagacctggaacagggcctggaccagctcaaccgcctgcgctcggtggacctcaccgccgacatcgccccaggcagcacagcgggcgcgtcgcgcatcatcctgcgctcacgcagcagtgcctcgcgctgggccttgggcctgggcgtggataacctcggcagcgccagcaccgggcgtgatcgcaatgccatcaacttgagcctggacagccccctgcaaatcaacgactcgctcaacctgagcttcagcgacacgctcaaccatgggccgcgctacagccgcagccacagcctgttctattccatcccctacggctactggacctacagcctgttcgccagccatgccgaataccgctcgccgttcaagctcagccgcaccacgttttacaacagtggccgcaccgatcaggtcagcctgcgcagcgaccgtgtgctgtggcgcgaccagggccaccaactgagcgccaacctacaactggcctacaaagacgtcgacagctacctgcagaaggtacacctggacatccagagccccaccctgaccgtggccgaagcgggcctgaacctgttctggctcaacagcgcggtgtggaacctggacgtcaactacgcccagggcctgacctggttcggcgccgatcgggatgccgaccaggtgcagaaaaaccggccaaaggcgcagttccacaagtaccgcgccaacctcacccaatggcgcaacggccaatggtcagcgcagccatggcagtggcaaagccagttgtcggtgcagtacagcccggatgcattgcccgccatcgaacaactgctgattaccgatgactcggccgtgcgcggctatcgcgaaaacagcagctccggtgctattggcgcggtatggcgcaacaccttgcgcctgccactcaacactgacttgccggtgaaactcaccccgcgcctgggcctggacaacggctgggtcaaacacgaacacggtgcccagagccaacgcctgagcggcgccaacgcggggctcaacctgagctggaagaacgtgcagctcgacgtcgattaccaacgcaacctcaacacccccacaggttttcgccaggagccggaggtctggctgacgcgccttagcgtgcagatatgagcccacacccgtttttagcctgagtcaccgccgtacctgaccaccccagcagcgttgcaacgcacaacgcgcgtcgtggatcagccaacacagagcgagattatttatgccgactactccacacagcttccacctttcaccccagggcaaactgcgctgggccattgccagcctgttcctgctgccgcagctcgcgctcgccgcaggcttgaccgtcgtcgaagggcctggcggcacgccgcaactgcaaaaccagggcggtgtacccatcgtcaacatcgtcgcgccgaatgcgggcggcctgtcccataaccagtttctggattacaacgtcgaccgccagggtctggtgttgaacaacgccttgcaggccggccagtcccaactcgccgggcaactggcggccaacccgcagttccagggccaggcggcgagcgtgatcctcaacgaagtgatcagccgcaacgcctcgaccctcaacggtgctcaggagattttcggccaggcggccgattacgtgctggccaaccctaacggcatttcggtgaatggcggcagcttcatcaatacgcccaacgccaacctggtggtgggtcgccccgaactcaacgacggcaagctgcaagccttgagcacccgcgatgccaacggccaactgacagtgcaaggccagggcctgcaaaaccgtgaaggctccatcaacctgatcgcgccgcgcatcgacagtgacgggcgcctcagtgcccgcgatcaattgaacctcaccgttggccgtaaccaggtcgacttcgccagcgggcaagtgcgccaggtggacccggccagcaagacccaggaccaacgcatcgacgcgcgcctgttcggcgcaatgcaggccgggcgcatcaacatcatcagcaccgccgaaggcgccggtgtgcgtgtaggcggcgtgcaggtgcaaggcactgacggggtgaagatcagttcggccggcgacctcgacatcagcggccaggtgcgtgccgacagcctcgacgccactcgcgctggcgtgcacagccgccagggcgatatcgacttgcacagtgccaaggacctgagcctggccgccaccgacgtcagcgggcgcaacgtcaaactcgacgccagccgcaacctgaccctcagcagcctggaaagccgcaagctccaggaaaagcgtgagcagtggaacaacagcaacttcctgttcacctacgaaacctacgaccgcaccaccaccgacaaagactcgcgccagcacggcaacaaggtcgtggcgcaacaggatgcggcgctgtcttccggcgccaacaccgagatcaaagccagccatgtggaagcgggcaaaactctgcgcgtcaacagcggcgcagaccttcaggtgaacgccgccaccgaaacccatgaaacccgcgaccagggcaaccatcgcaagcacctgtggaaagccaactgggataaatccagcagcgaacaacgcagcatcaccagcagcctcaaggccggaaaaacactggagctgaccagccaacagaagctgcaattgcaaggcgccgagctgaaaacccccggcgatattcaactggccgcccggcacgtggaaatcaccagcgccagccgcacccagagcagccgcgacaacgcctactctggcgacctcaccggtggcagcttcttcggcaagaacggcgacggcaaccaaggcaagacgtcgaacaccgctagcaaggtcaacgccgacggcaagctgatcgtcaaggccgacgacgtgcgcatcagcggcagccaggcccgtggtggcaagcaggccagtgtcatcagcgataaaggttcgctggtgatcgacggcgtgcaggacacctcccacgacaaccgctacagcaacgacagcaagttcttcggcatctccaaggatgaaagccgcaagaacctcaaggacagcaccgtggttgccagcgacctgcgctcggacagcaacctcaagctgcaaagcgcccaggacatccgcgtcagcggctcccaggtgtcggctggcggtgaactgcaggcggatgccaaaggcgatatcaaggtcgttgccgccgagaacaccactcacgacaccaccggcacccatacgcgcggcttcgatggctacgccaaggaaaccgagggtgtcagccgccagtaccgtgcggggttgagctatgaagaccagcagcaaacccgcaagaccgacaccaccgaacagcaaggttccagcctcaagggcggcagtgtcgtggtgaaggccggtggcgatgtgagcatccagggttcggacctcaaggcaaccgcaggcgatgccaccgtcagcggcaagaacgtcgagctgttggctgcccacgacaagcacaccgaagccgtcgacaaaaccaccaccggcggcagtttctactacaccggcggcattgatcgggcaggcagtggcgcgcagttcagccaccaaagcagccaagacaccgctgaaaaaaccaccgcacaaaccagcgccgtggccgcgaccggcaagctgaccatcaacgctggcaacaccttcaccagcgagggtgcacaggccaaggccggcgccgagctgcaggtcaacgctggccagattaacaaccaggccgcccattccaccgagaccagcacccacaaggaaaacggctggaccgccgacgtcggcgccaatgtggaatacaaaggcattacccgcccgattgaaaaagccgtcgagggtgtggcccaggccaaattccatcaacccggtttgctggacgcattcgagcaacccaatgtcggcctggatgtggaagtcggccacacgaacaaaaccggcacaacgcaggacagcaccgccgcggtcagccagttcagtggcgccacggtgcaggtcaatgcagccggcacgttgcaggacgagggcacccaataccgcgccaccgacggcgggctgaacatcaaggccggcgagcaccttgccacggcagcggccaacacccacagcagcagcgaacaaggcgtggacgccaaggctggcgtgcgggtctataccaccaccggcgaagacgtgaatgtgcgcggcagcggcctgggcggcagcagcgatgtgcgcgaatccacccgcacagcagtggtcggtagctatgtggccagccaaggcgtgagcatcgaggccaagggcgatgcccgttatgaaggcagccagttcgacggcggccaggctggggttaacctcaagaccggcggtgagctggcgctcaaccaggccaccaacacccagagcaaaaacagcagcacgctgcgcggcaacggctcactgacggtgggcaccgcgcccggtgcgaatggcagcaacatcaacctcggtgccggcgtgcagttggataacaagcgcctggacacccaggacagccaggcccaggtcgcgacccttcaaggcagcggccccatccagctcagcagcggcgctgacatgaccctgcaaggcacgcagatcggcagcacgggcgcgaaggctggcgatatcagcctcaatgccggcggcaagctaaacctgcaagccgccaccgacagccacgtcagcaacggcagcaacctgggcggtggcctgaccctcggcgccggcaagaccagcagcgccgaaagcagcagcaagaccggcagcctcagcgccaacttcaacatcggcaaagtggcggaaaacgaccagagcgccgtcgtcgggcagttgcacagcacaggcaaagtcagcctcgccagcggcgctgaggcaaccaatgccatccacttgcagggcactcagatcagcgcagccagcgttagcctggatgcgcaaaacggcggcatcgtgcaagagtctgcgcaatcgacccaggcccataacaactggggcgttaccctgggggcgggcggcagcgttagtaaaaccaccttggccaatgccggtgaacatgcgacacccaagacccagcgcggcatcaatgcgcgggccacggtcgatgtggatcacctgcaaggcaccacccagcacaacagcctgatcacggcgggtgacgtcaccctcaacagtgccggtgatacccatctggccggcgcgcgtatcgacgccgacaaggtgagcggcacggtgggcggcgacctcgtcgtcgaaagccgcaaggaccacgtcaacagcacccaggtaaatgtcgacgccaggctggatgtcgaaaaaaaccagccgggggtggtggataagctggccaaagccagcggcccactgaaggacaaggtacaagccaaggctgaaggcgcgttcgacaagcatcgcgacaagctggagaacgtcgtcgacaagggcaccgggcacctggcgtcggccaaggacagcgtggtcaatggcgtggttaacgcgaaggaacgcctgggcgaaaaactcacccgcagtggcagctatgacgtgaacccgcaaccccgtggcgccttcggcacccgcgtggacaaggccaaggcttacctggcagacaagaccgacgccctgggcacgcgcctgtctggcttcaaggataaggtctggtcaaaaaccagcgacagctacaccgtcagtggcaaagacaccactggcagcaaggtggccaataccgctgaaagcgtgttgttcggtgacaagagcggcaataccagctacaccccgaccctgtatctggatgtcagccatgtggccaaggacagcgtcactcaggcgtcaggcattcgcgcaagccagggcgtcaacctgcaggtcaagggtgatacgcagctcacgggcgcgcggatcagtgcgcccaatggcaaggtcgagctgggtggctccaaggtgaccgcaaccaccctggccggcagcgactaccgtgccgatgtcgggctgaacgtttcgaagtcaccggtcaacctggccctgggtgccaaggacgaactgacccagaaacacgacgacgccacgcgcaaggatcaagccttcaacctgggcccgctgcgcgcgggtgggcacagtgaaagccaggccttgcaggcggggattgatcaggccaccaactaaagggtaatgcccaccccactgtaggagcgagcttgctcgcgaagaacgtcaacgatgacgctggcatgcttggagtacgcggcgtcctcaggtttttcgcgagcaagctcgctcctacacatcagttgaagagtgcctgtacgttcttcatcgcgtcatcggcaaagccttgcaggaaggcttcaaacgccggtacgtcttcctggccgcccgtgtacggctggccaatgatggtccaggtcgccaggctctgggtcgggccttgtggcacaacttccatcagcgcccacaggttaccaatgttcagtgaggtgtaaatcagtgaccaggtcatggtcatggcgtggtcgtcatggctgttgagttgctccatcaccacattgccgtccttgaacaacttcttgcggaccgaacgcacgccctcgccggtcatttcgatatgggacaacgccggaataaacttcgcgaaaccggcgaaatcgccgaccacattccacacactgcgagcatcgccgttcacgctgacactggcgacgacagggttacccaccgggttacggaccagggtatcgggttgttgcataagagagctcctcttttccgggaggccgatagtgggctcctacccaacgcagtgagctgtacacattcaacacctgcttggcgtggttatgcgtttttggctgactgccgtaacgccaaggccgctacaccacacacgatcaacgcgatacaggccacgtagaacgcatcgctgtaggccatcaggtacgcctcgcgccgcacggtgtggatcaagccctcgatcacctgctgttgagtgggtaacagcgggttgaagatgaaggcctcgctgtcagccaggctggcgcgcaggcgctcctgaaaggccggggaaaacagcgtaatcgactcccctacccgctcagagtgaaagcgctcgcgcatggccacgatctgcgtcaggcccgccgtgcccacggcaccacccagattacgcagcatggagaacaaggccgaggccgagccggcttcatccttggccaggccagacaccgccagtacggaaagcgccaccatgatcagcggctgcccgatgccccgcaccacggtggacggaataatcacgttggcggcgctgtccacgtccaggtgcgcaccgaggtagcaccccagggccatgatgaaaaagccactggcaaccatcagtttcgggttgagccacttcatcaggcgcggcatgaacggcgccagtaccagttgcaccatgccgtaggcgatcaggctgatgccaatctcccgggcgttgtagccctgcaactgggacaggtaattgggcaccaggaacaccaggccgaaagtggccccgccgaagatgaacatcgctgcgctggccacgccgaagttgtagctcttgagcaggcgcaggttgatgaaggcgcggctgccatacaactgcgacagcacgaagtacaccagggcaacgccggcgatcagcgacatccacacaatgaaaacggagccgaaccagtccttgcggccgccttcttccagcacgatctgcaagccacccaggccgacgatcatggcgatgatcccgccccagtcgccgcgcttgagcaggctcaactgcatgggtttggcatcgatcgaccatgccaccgccaacagcaagagaatgccaggggccagttgcaggtaaaagatccagcgccaggaataggcatcggtcagccagccgccaatggacggcccggcggcctgggcgacgctgttggagagcgcgaacaaggccatgcccatcgcgatcttgctgggcggcagttcagtgatgatcagttggaatgacaaaggaatcagcactgccccggcagcgccctggatcacccgaatgatgatcatcacttccaggttaggcgcccatgagcaggctatggacgccaccagaaacacaaacgagcccacgagcatcacacgccgcagagagaacacctgcaccaaccaggcggtcagcgggatcatcacgatttccgcgaccaggtaggcggtggaaatccacgagccttcttcgaacgtcgcccccagggagccttcgatctccggcagcgcggcgctggtcacgtgcacgttcatgccggccatgaaacagccgaacagcccaccgatcaccgccacccaggcgcgaaaggagacgctcttttcagccgattcagtcatgtgcagcgccctgctcagccgggcgggtgttcaccgtggtgatgaccgacatgcccggaaggattggcccgccttcgtcatgctcatcaatgacgatcttcacgggaaagcgttgcacgatcttggtgaaattgccggtggcgttatccgacggcaacagtgcgaacaccgccccggagcctggcgagaagctcaccacatggcctttgagcttgcgccccgaataactgtcgacgctgatatccaccggttggccggcacgcatatcgcgcaattgggtttctttgtagttggccacgacgtaagcctgctgcacaggcaccaccgccagcagcggcaaccctggggcgacgtattggtgggttcgcactttgcgctgccccactacgccgtcgatgggcgagcggatcaaggtgtcctccaacgcatgcgtcgccaggttcaaccgcgcctcggcctggctgcgccgggctatctgctgctggagcgaggcctgggccaattgacggcgggtgacggccacggtcaagcgggtttcctgctgaagttgcatggccttggcaatctccaccgcagcattggcctgggtgtaactggcggcggccgtttccagtcgctgggtgctggcggcgtgatcgcgcaccaaaccttcgtagcggcgctggtccaagctcgcacggcgcaattcggcggccacgctgcgggcgtgagcctcggcctgggcaacgccggccttttgctgggcgatcaggctgtcggtgacgtgcaggttggcctcttgcgccgccaccgaggcttggctttcggccagttgtgcgcgggcctgtgccaagcgggcctggtagtcacgggcctcgatgcgcaccagcacgtcccctgccttgaccggctgatcatcctctaccatgacctcggccacatagcctgagaccttcgggctgatgggaatccagtcagcccgcacataggcatcatcggtctgctccaggtagtggccgaccgtcatccagtacaggccgaacaccaccgccgcgatcaacaacgcggcgacgcccagcaggagcagatgccttttgcggcgtgggttgcgagtaggcgcctgttcatcctgggcagcagttgtttcatcaacggcgatattcatggctgggtaccggaaagagtggtgtaagcgtgggtgggcgctgatgactgccaaccaccgccaagggcacggaacaggctgatctggcgttgcagcaattgaccatcggcgtcggcccgcgtggcctgcaaacggatcagctcacgctcactgtccagcacgtcgagaaagtcgatagaacctgcgtcgtagttgaattgggccaaggtgtaggcctggcggctgctctccagcgcctggctcagggccgcgtggcgctggcgttcgccgtcgtacaacgccagggcctggcgcacctccttgagggccttgagcacgctggcctcgaattgcgccacctctacccgctcaagcgcttgcgcctggttgacccgtgcgcggttggcctgccaattagggaactgccaggtgatcagtgggccgatgccgaacatcaccgcactgctatcgcccagctcatggaatttgttggctgaggaagacactgaagcgccgaaggtgaccttggggtacaggtcggcctggacgatatccacttgcagcgtggccgcctgcaacgcgcgctcggcctgccggatatcggggcggcgcgccaataattgccagccatcgcccaccggcaactcggcattgagtcggggcaccacttcacacgttgcggcgccagagccttcttcaagatcagcgacgccggtcagcatggccaattcgtagagcgcggcttgtcggcgcgcctgcagcatcggcagcaacgcctgggtttcgccttgcagggcttgcatgcggctgtattcaaggtctgtcaccacaccggcctggcgctggcgatcaatcaacgccaggctgcgcccgaccacgtccaacgaatggcgctggaccttggcacgcgcgcccaaagcgcaggcatttacataagcgcgggtggtttgcgccacgaccgtgatgcgcagcaagtcttcggcagcttgcgccgccgcggcttgcacctgggctcgttcgatcgtgcgctggacctggccccagacatccacttgataagccagctcgaagcctgggttgaatgcccactctgacggcgcgtggctatcggtggccttggccagcgtctggtcatcggccgtcttgccgtaagcggcacccagtgacgcctgggtggacggccagcgctcggcatcggcctgcatgatccccgccagcatcgcctgcacatgggcctgggccgccgccaggtcgcggttgtgcagcagcgcctgttgcaccagcgcatcgagttgcggatcgttgtacaactgccaccaacgctcgggcaatgcctgggcggacacaccctgcggcagatggctcaaggcattgatgcgttcaggatgtggctgtgccggcttatgtgcgacccaggatgaacaacccgccaacaacgccactgccacaccgagcagcgagagacggccatgtcgtgggaaaaaagaaggcgaacccatcaaagaaatccagaaggccaagtagagacgcagggtaaaagcgcaacggggtgcgcatctcccgagttctggacaaccatcgtttcgattgggacaaggtgggacgacgcttctgaatcgcgcgtcgaactcgttcagaaatgtgggagcgggcttgcccgcgaaggcggtgtgtcagtcggtgcatctgttgctgcactaaagctttcgcaggcaagccagctcccacattggaccttcgtcgcccctcgccaaagtgccagtcacggctaccgctgtgattcagaccaggcggcagtgactcggggtgtaacccagggtgcgcttgaacatcgcggtaaatgcactagggctttggtaaccgtgctccaaagccacctccaaaatggaggcgccactggccagccgctgcatgctgagcagcaaccgcgtgcgcttgcgccattcgccgtaactcatgcccagttctttctggaacagccgagcgagggtgcgtgaactcatattgagctgcaccgcccaacactccagtttcgattcctgggaagggttgtcgataaagtcggcacacagtgatttgagcctcggctcatgcgggatcggcacatgcgccagtacccgctgcgcgcggtcaagctccgagaaaatcagctcgacaatctgcacatgacgcaacgacgccggctggctgtcaggctcatcgcccgcagccacaatcagctcgcgcagcaagggtgaaaccctgatgacctcgcacgcctgcgccaaccgaccgtgcgcccccggcgagatcagcaaagtgcgcatacgcacctcgccggtcatgcggatctgatgctccatcgccgggggcacccatagggcgtgcccggaaggcagcacccaggttgcctgctgcaccgacaccagcattacaccgttgatggcatagaccagttggccctcgtcatgtcgatgagcagccactatgtcgccgtgcacgtagttaccggcgagggctgccaaagaggtatgcgcgttcatttcagcaagccgcgagcaggtcaggccggccactgttggaaggatccttgggcatcatgtcgcgtctccttttttgaacagagtgacccattgagcctcagtggccactggatccaatactaaacaaagaaagggggcggggaattgcgtattagggtggggactgtgaaaaaacgtcgagtaaaaattaaaaaaaccaaaatatcggcgagtagatttcaagaaaaaaagattattgcttttggggataacaggggctcgcaaagagcccctgttcgggcttaaccctaaaacgcgtaacgcgccttgaccatcaccccatcagcatcaaacccgctacgcgcctggcgggtatagctggcgcccacggtcagcgccgacacctgataattcaggcccaggctggcttcgtaactgtcacgtgcgaccgaagcgcccgtgacggtaaacgccgaaccgcccagcacaaagctggaggtttgcgccacgcggtcacccatcaggtcgtggtaggccatcaatgtggcttccggttgcaggctgccagtggccaacgggaagttgccggccaagcgcacacccgcgcccaactcgcccacttcatagcgttgcgagccggtactcagcgccgctgaggagcccttctcggtgaagctgtccatgcgcacgttggaataacgtgccgccactcgcggttcaatcacggcagcatccgacagcttgaagctgtagccgccctgtacgctggccgacaacacattgctgtcgtagctgcccttggcggttgtgcccgctacacgacgcttgctgtcattgtcgttatggccgtagctcaggctgccgtcgacgaaccagttctgcagcgaccagttgccgtacaacgacagcgcatggccctgcacgtcggtcttggtgcccaggtccgaatggatgttggagttgaggtagctgtaagccacacccaccgtggtgctgtcgttcaaccgaccatccacacccaccgccatgccgctgctgttggccgaataaccgttgtcgccgctgcgtccatcctgatccatgttgctgctcaagccttgcaaccacacacccacggcttcgcgattatcacgctggcccgagaggcgattgaggatcgcgccattgatcaccgtctggcccgacaaggccacgtccagcgcaccacggttgacgtccggcttgagttgctcgcccacctgcgccaactgctgcgccgtgcccgcgttggccagggcctggaacaccggatcatccgttgccaactgcccgagcacgtcattttttgcttcgttgaccaccgtgacaaccggctcagtggcgcccgcgccggtcagttcctcttgcacttgctgattgctcttcaaccccaccacggccttgaccgtctgcgcatcggccgaataactgagcacgtccagcaacgacgaagtgctggcaaccgacaggccgttgttctgcacactgctggcttgcagcaaggtgtattcggtgccgctcggcacgggggtgaaatcgcctgggttggcgctcaaggtcactttcgatgcctgggcgaaattcgccgcaccgttgaccgtcaggtatggcgtggtcggcactacgctgttggccaggcgcatatcaatgcctgcaccgctggcgacgttgaggtcaccggtgagcaccgtgcccggggccgacaggttcagagagcccgagttgatcgacaccggcgcgatgatgcggctgccggaaaagtcagcctggccggcgatgttcaccgcgctgacgttgagcacgtcgccgacgattttgccgccggtccagttgagggtggcgcggttggctgcgtcgatagcgattccggaattgctgcggatttcaccggcttgttggttgatttcgaaggtggaggtttgctcagctgcgtcgacagagatggccgtgccatcggcgatgatcgtgccgcggttgatgatgccgcgggagccggtggggctgttttgggtgaaggtggcgcccaggagatcgatcgctttggcgtttgtacctttggcttcgagggtgccggtgttgaggatggagtcgacggtacctgcataaaaaacaataccggaagcatctgcgccgttcacagacagcaggccactgttttcgatacgcagtggactcgtggtggtttcaacttctatgccccaggcgcgctggcccgttgcagtgatagtcccggagttgatgattttgccgccgatattgatcgggaaatcactcgggccatccactgccagcgccactacttcatcgccgaccacctcgatcacgcccgtgttagcaacgtcgcctgccacttgcgtgttatgcaggaacataccctcgccgccaaccgtgccaccaaaagcagaagtgcccgatacaacgggagttgttttaatggtgccggagttgattacgctgccaccaatcacggcatcaccaatctcaaaaccttcgtaaccgccattgttcatggtgatgttaccggcctgaatcagatcgcccgtaatcgtactaggggttgagccgtcgtttgcaaaaccgaatgggtccacggcaaacgcccgaatggaacgtccgtcagaggtcatcacaatatcagcacgattgatcagcgaaccttgaatactggtattggaaacactgacacccatcaacgcagtagtgccagagtcgggggtgggcgtttgattggtcgcttcagtcagcctcccggtgaaggtcagagattcgttaaacgtctcacccttccacgaggttttgccttgactcagatccacttcaacggccaatgcctggctgctgattgcaccgaccaccacggccaacagtttttgcttgaacggtttttgcttcatttgaaaactccatgtacgacagaagacatcgccataaacccatggcgattacagatataaaacgaacgactacaacaagcgccgctgcaccgcctcatccaacgtgctgcgggtcagagcttgcaccacctcgtgggtgtcctggcggaaaggtagggcaacgatcaacaacaattgcatccaggtacgcagcgactcgctcttgcgcacacggcccagccccttgccgggcaagcggcgctgctgatcttccaacaggcggttttgccgctcgcgaatcaggtcctcacccggcagggttaaggccatcacgctgtgggaagcgaggcattgagcacccacacgaacgaccgaactattcggtcagtaccggcccgcttatgagttaaggaatattttggactgcaacggaatctgagcaagggctgactcagcgtcgactcggacttgccaaataacaggcaaaaaaaaacccggaaatcctcacttgcgtgggccttccggattttctaaaccgccaaaaatggtgggtcgtgtgggattcgaacctacgaccaattggttaaaagccaactgctctaccaactgagctaacgacccgctgtgtggtggcgcgtataatactgatttctaaggattattcaacaccttattttaaataaatcagaaaaaacgcatttgaacggtaattcggtgggtagaacgcctatcgcagccgcctgatcagcgccctggctcgtcgttccacaggtacttgtgcagctgcaattgcaggcgcaccggcaggttgtccgccactacccagtccgccagctcccgggcgttcaggtcgtgatggctgggtgagaacagcacctcgcccgcccgccgctccaggccatactggatcagcttggaggtggcccagtcataatcgtcacgggaacagatgacgaacttgacctgatcgttggccgtcagcaagtcgatgttctcgtagcggttgcggtgggcttccttggagtccggggtcttgagatcgacgactcggctgacgcgcgaatcgaccgcagagatgtccagggcgccgctggtttccagtgacacctcgtagccggcgtcgcacagttgcttgagcaaagggatggcgttgggttgcgccaagggctcgccgcccgtcacgcagacgtagcgcggccggtagccggcaacctgttccaggatgtcgtcgagggtgcgcacggtgccgccactgaaggcgtaggcgctgtcacagtattggcagcgcaatgggcagccggtcaaccgtacaaagacagtgggcaggccagcagtgcgcgtttcaccctgcaacgagtaaaagacttcggtaatacgtaatgtgtcttgcatagtcgccacgggcgtaacagctaaacaggctgtccgcctccgtcaggcacttcaagggattgcgccaacgcgtcaaccccaggaagcgtgtttcataaaagggcgtggattctaacgaaaaaacccgcgacaagcgcgggtttcttctaaacggctgcatggcttacaagcgttgcaggtcccgctgggccaactgcgccgcggaggtacccgggtactgggcaaccacctgctgcagaatgcctttgaccttgtcggtatgacccaggcggcgttctacatcagcgagtttgtacagcgaatccggaaccttggcgtgcttggggtacagctggctgaccttggcaaaagcctggcccgccgcttgcaaatcaccctttgccaggttgacctcacccaaccagtactgggcattgcccgcgtattggctgttagggtatttgcgcaggaaagcggtaaaagcctggctggccttatcgaagtccttggccttgatcaggtcgaaggctgcatcgtaatacagtttttccttcgctggatcacccggctcgctgctggcagcaggggcggcagcagcggcccccgctgcggcgccaccggcagcggcactgggtgcgccaccggcagaagaattatcaggagtagcggcaggtgcaacaccggctccaatacgacgatcaagatcctggtatcgctccaagccttcttgcttcagctggttcacttgattttgcagaacttcaatggcgccttgttgctgggccaattgatcctgcatgcgttgcagctggttgaacagttcgccctgtgccgagggagcggacgtagccgctccccccgcataggcgccgttcgtgccataacctgctggcggataactgctcccgctattgttatagcctgagttgctatccgttacaggaaccgcagcccacaccgcaagcggtgcgaagctgagagccaatacagttagagcacgacggcacgttcgcatgacgaattacttacgcagttcgacgcgacggttctgagcccacgactgttcgtcgttgccagttgcaactggacgctctttaccgtaggaaaccagttccagttggcctggagcaacaccttgcagtaccaggtagcgctgaacggctttcgcacgacgctcgcccagtgccatgttgtactcacgagtaccacgggcgtcagtgttaccttccagaacaacgcgagcgccgttagctttcaggtccttggcgtgaacgtccagagcgcgcatggcttctggcttcaggtccgaactgtcgtattcgaagtagaaagtggtgatagcgcgcagagcagcttcttcgctcagggagccgtcgaccgcaccagtgttggcgccgtaaccagcgtttggatcaacagctgcgccttcaccggcattgtcgccgcctttagaggagcaaccaacggctacggacagagccagagccagagcagcaaacttaccaaacttcagcatttccatcgtgaaactcctaatgaaccccagtgtgttaagtacttctttttgtagcgccgcgtcagttcaggtaaggggaccaggatggttctctgacttcgccttgtgcggtaggaagtgggagccttacgcgtccattgatggacacgagcatcaagactccccggccctgctggcgggtggcgtagattaccatggtgccgttgggcgcaacagtggctgactcatcaaggttggtatctgtaaggatttttacggttccgcgctgcaaatcctgggccgcaacccggaaattagtgaaaccatcctgacggtgaatcatcaccaacgtcttttcatcggccgaaagcttggggttggcgttgtagttaccaataaaggtcacacgttccgcaccgccgccgttcacatttgccttgtagacctgaggcttgccgccacggtcggaggtgaagtagatggtcgaaccatccttaccccagaacggttcggtgttgatgcccgggccgctggtcacacgcgagagctgacgcgaggccatgttcatcacgtagatatccgggttgccgtccttggacagcacgaaagccaggcgcgaaccatccggcgaccaggctggcgcaccgttgaggccttcgaagttggtgatctgctcacgacggccagtatcgatgtgctgcacaaagatgcgcgggcgacgctgttcgaacgatacgtaggcaatacgcttgccgtctggcgcaaagcgaggcgacaggattggctcgcgggactgcagcaaggtcactgcacgtgcgccgtcgtagtccgaacgctgcagggtgtagcgggtattgtctacagagaaacgctcagccgtcacatacagcaggcgcgtcgagaacgcccctttgataccggtgagtttttcaaacgactggtccgagatgtagtgagccatgtcgcgcagttgctcggcggtacccgatacgctgccggtcagaacctgctgctcggtggccacgttgaacaacgtgtactggatctgcaggcgaccgccggccggcgtgatgctgccgaccatcaggtactgggcaccgaccgccttccagtcacggaagatgacttcgctggcctgggttggctggctgatcatgttgccttttggaatcggcgcgtagtaaccggagttacgcaggtcgtcgctgacgatctgggccatgtcgtccggcagcacgctgccgccctgccaaccgaacggcacgactgcaatcggggtggcccgatcactgccgctggttaccaggatgttcttttcatccgccgccgctatccctgccatacagcaaataacgacaagcattcctcgaagaaggtttctcacaaggctagatcctcaggtgtgaatgtcatcttgaatgaacgatagggagcgaagtcacttggtttcattccctgcatctcggtcaaccggccaatattcttgaccgcggcaaccgccgaactgtcgaacgaaccgtcaccactggacttggccacgctgaccgaagtcaccgtaccgtccggcaacatgccgatctgcagcactactgtcatgcctttacgtgccgaaggtggacgtgtccagccttccgctgcccgcgcccgaatcaggtcgtcgaaactgcccgcgacttcatcgccacgctcatcggccaaggcttgctgacgctgcggcgtgtcggaaagcaaatctgccagggcctgggcctttttctcttcggcggatttgcgtgctgcttcctgggcctttttcttggaggcgtcggcggcagctttcttcttcgcttcgtcggcgactttcttcttcgcctcgtctgcttcagcttttttcttggcgtcttcggcggctttcttcttcgcgtcttcgactatctttttcttggcttcttcagcggcctttttcttggcctcttcttcggcagccttcttggcttcttcttccgatttcttcttggctatatcagccaattgtttctcttcggcctttttcgcttcggcagctttctcggctttcttggcttcatcagcctttttcgcctcgtcggccttcttggcttcgtcagcctttttcgattcctcggccttttgagccgcctcttctttcttttgttccgcagcagccttcaccgcttcctgctcgaccttcttctgttccatctgctcgacttcagtctggcgcgcggccgacttctgggcctcacccgcaatcttctgattggtctgggtggtggcctgacttttcgatttcagctgatacagggtcgcctgcacgatcggcttggctggcggcaggtccggggtcatggcaaagctgacgaacagcatgccgaacaccaggacgtgcagggcaattgcccacacgccaggccagaagtagctttccgaggcggacggctctcgctgttgctgcatcagggcgcctcggtaatcaagccaacgttaccgacgccggccttctgcagcccgcccatggcgcccatgacggagccgtagtcgaccgatttgtcaccccggataaacacctgggtgtgcttgccgccttcgttgccggagcgaatgatcttggtcaccgcatcggtcattgcaggcaaggtcagggccttgtcctgctgcttttgcgtgtcgacttcgctgccaaggttccagtaataggtcttgtcagccttgatcgaaatggtcaggacctgagtgttgttgtcctgcggcaaggcttcactggaaaccttgggcagatcaaccttcacgccctggttgagcatcggcgcggtcaccatgaagatcaccagcagtaccagcatcacgtcgatgtagggcactacgttcatctcggcgaccggcttgcgctttttgcgagctcgagcgattaaagccattggaattacctgcttattcttcgctggtgtgcactttacggtgcaggatcgcctggaattcatcggcgaaggtgtagtaacggccgatcaaggtttcgctggtggcggcaaaacggttgtaggcgattactgcggggatagcggcgaacaggccgatcgcggtggcgatcagggcttcggcaatacccggggccacggtggccagtgtggcttgctgcgcctgggccaggccgcggaaggagttcatgatgccccatacggtaccgaacaggccgatgtatgggctcacggaacccacggtggcgaggaacggcaggccctgctcaagtttctcttcttcgcgggagatggcaacgcgcatggcacgggccacgccttccatcaccgcttccgggtctacaccaggctgctggcgcagacgggagaattccttgaagccggcacggaagatctgctcgacgcccgagtccgggtccgggttgctgccggcctggcggtacagcttggacaggtcgatacccgaccagaagcgctcttcaaagctctccaaggcacgtcgaccggcacgcagcatgttgctgcgctgaaaaatcatgacccaagaggtaaccgatgcggctaccagggtcagcatgaccagttgaaccacgacactggcattgctgaccaggctccacatggaggaatggtcgacgacggtaggttccacgctaaatctcctgctttgattgttgacccgcgccgctcacggcggcaaaggccgcgcgtagagtttcgggaatggcccgaggtttcaagctgttggtgcgcacacacgccaccaggaactgcccctcacagagcagcgttgcatccgtggcccgcctgacctgctgtttgaaacgcaggctggcacggttcaattcgatgacttcggcactgaccagcaattcgtcgtccagtcgcgccggtgcgtggtaacgcgcctcgctggaatgcacgacgaataacaggtcctcgcctacaagctcggactgggcaaaacccaactcccgcagccgctcggttcgagcccgttccatgaatttcaggtaattgacgtaataaacgatgccgccggcatcggtgtcctcgtaataaacgcgacagcgatgtgcgaacgactgatccccgttttgcgcgcgcatactctagtgcttactcctcaggttgccaattggctgggcaactgttttttcattcctgaacgctttcaaatgacgacgccagacactgggacagcacaaagctcggataaatcgtccggcgtaagctttttaatcgtctactgcatcgaggaattcgtctaccacgggcatctctcccaatcgtgacggaatgtttagcccaaagtgcaggtaagcatggcgtgtcaccaccctgccccgcggggttcgcatgatgtagccctgctggatcaggtacggctccagcacatcctcaatggtatggcgctcttcactgatggccgcggccaggctgtctacgccgaccgggccaccgtcgaatttctcgatcatggtcaaaagtaggcgccgatcctggtgatcgaagccatgctcgtccacatccaacaggttcaacgccaggtccgccaccgccttggtgatgtggcccttggcacgcacctcggcaaaatcgcgcacgcggcgcagcaggcggttggcgattcgcggcgtgccacgagcacgtcgagcgatttcaaaggcgccttccgggtccagaggcaagccaaggatactcgccgaacggctgacaatggtcgccagatcggcggtgctatagaactctagacgttgaacaatgccgaaacggtctcgcagcgggttggtcagcatgcccgcacgggtggtcgcgcccaccagggtgaatggcggcaggtcgagcttgatcgagcgggccgccgggccttcgccgatcatgatgtcgagctggaagtcttccatggcggggtacagcacttcctccacaatcggcgacaagcgatggatttcgtcgataaacagcacgtcatggggttcaagattggtcagcagcgctgccaggtcgcccggccgctccagcaccgggccggaggtggacttgatcgacacgcccatttcctgggcgatgatattggccagggtggtcttgcccaaccccggcgggccgaagatcagggtgtggtccagggactcactgcgcccgcgcgcggcctggataaacagctccatctgctcgcgcacggtaggctggccgatgtattcggccaggctcagggggcggatggcccggtcctggacttcttcacggtcacgcgggccggtggccgcgatcagacgatcggcttcaatcacttaaatcattcccttcagggcacggcgaatcatgtcttcagcgctcaggttcttgtccttgatggccgatacggccttgctggcctcctggggcttgtagcccagggagatcagcgcattgaccgcatcgctttccgcgctggcgacttgggccgctggcatatccggctggttcggtaccagggcgaacatgctcggcaccacttcccaggctttgaagcggtctttgagttccaccaacaagcgctcggcggttttcttgccgacccccggcaccttggtcagagccgaggtgtcttgggcggacacggcacgcaccaactcatccacttccaggctcgacatcaaggccagggccagtttgggccccacgccattgagacgaatcagctcgcggaagaaatcgcggtcgcgcttgccgatgaaaccatagagcagttgcgcgtcttcgcgcaccactaaatgagtgtgcaaggttatcggctcgccgacggacggcaggcgatacaaggtggtcatgggcacttccagctcataacccaacccattcacatccagaatcaggtgcggcggctgtttctcagccagggtgccgcgcaagcgtccaatcacggttcagatccttaaagcttgggggtcagttcaaggcctgaccgcaaaaataacgattgcgctgatgctatcagagacgcaggcgcccgccacgactacgtgctgtgcccaagccgtgaggcaacaggctggagcgggtatgggcatggcaaatggcgatggccagggcgtccgaggcgtcgatctgcggcttggaagtgagcttgagcatgtgcatgaccatcatctgcacctgctccttgttggcgccaccggtgccgaccacggcctgcttgacctgggtcgcggtgtattcagcgatttccatgccctcctcggcacccgccacgatggcggcgccacgggcttggccgagcttcaacgccgagtcggcattcttggccatgaacactttttcaatgcccatggtgaccgggccgtaggtctggatgacttcacgcacgccgcgataaacgatctgcagccgttcggccagctcgccggcaccggtgcggatgcaacccgaggcgacgtacacgcagccgcgcggggtctgctgcaccacgccaaaaccggtgatgcgcgaaccggggtcgatacctaggattaaagtcataacgcctgcgggttggatttacaacggtatgtgccaggcacacatttgtgtaacagcatagaacccctgagggagctggcttgcctgcgatgcgggcacctcggtgcgtctgtcaaatcgaggtgatgctatcgcaggcaagccagctcccacagtggatattcatcgttcttaagtgagctgttcggccacagactcaggaatgtcggcattcgaatacacattctgcacatcatccaggtcttcaagcatgtccagcagcttcagcaccttttgcgcaccgtccaggtccagttcggcactggtggtcggcagcatcacgatctccgcgtcggtgccactgaaaccagcggtttccagggcgttacgcacggcgtagaagctggcgaacgaggtaaacacgtcgatggagccgtcttcgttggtcacgacgtcatcggcatccgcttccatcgcagcttccatcagcgagtcttcatcggcgcccggtgcgaaggtgatctgccccttgcgctcgaacaggtaggccaccgaaccatccgtgccgagattaccaccgcacttgctgaacgcatgacgtacggctgccgctgtacggttgcggttgtcggtcatgcattcgaccatcaccgccacgccgcccgggccatagccttcataggtcagctcgaccatatcgtcggtatcggccgcaccggcaccacgggccacggcgcggtcaatgatgtcgcggctcatgttcgcgcccaacgccttgtccagcgcgaggcgcagacgcgggttggagcccggatcaccgccaccctggcgggccgcgacagtcagttcgcgaatccacttggtgaagatcttgcctttcttggcatcctgacgctctttgcggtgcttgatgttcgcccacttggaatggccagccataacacaactccgaattctctagaaaccttatcaatcccgccccaggcgagatttccctcttttaaacgcaaaggcgcatccgaagatgcgcctttttgactgcctaccactttatcgcgctttcacgcagcagccttactcagccttcggcgtctcgcgcaggcggatgtgcaactcgcgcaaggccttggcatccaccacacccggcgcctgggtcatgacgtccgcagcgctctgggttttcgggaaggcgatcacttcacggatcgactgggcgccggtcatcagcatcaccagacggtccagaccgaacgccaagccaccgtgcggcggcgcgccgtatttcagggcgtcgagcaggaagccgaatttctcttcctgttccgcttcgttgatgcccagcaggcggaagaccgcttgttgcatctctttgcggtggatacggatcgagccgccacccagttcagtaccgttgagcaccatgtcgtaggcacgggacagcgcgccggccgggttggcttccagctcctgcggggagcacttcggcgcggtgaacgggtggtgcaaggcgctaaagctgccgtcgtcgttctcttcgaacatcgggaagtccacaacccacatcggcgcccattcgcaggtcagcaggttcaggtcgtgacccagcttgatacgcagcgcgcccagggcttcgctgacgatcttggccttgtcggcgccgaagaacacgatgtcgccgtcaaccgcaccgacgcgatcaaggatcgtgttcaggttggcctcagggatgtttttcacgatcggcgattgcaggccgtcgacaccgttggcgcgctcgttgaccttgatgtacgccaggcccttggcaccgtagatgccgacgaacttggtgtagtcgtcgatctgcttgcgcggcatgctcgcgccgccaggcacgcgcagggcggcgatacggcatttcgggtcgttggccgggccgctgaacaccttgaagtcgacatccttgagctggtcggccacgtccaccagttccagcgggttacgcaggtctggcttgtcggaaccgtagcggcgcatggcttcttcgaaggtcatgtgcgggaattcgccgaactccaggcccagcacttccttgaacaggttgcggatcatctgctcggtcaggcccatgatctctgtttcatcgaggaagctggtctcgatgtcgatctgggtgaattccggctggcggtcagcgcgcaggtcttcgtcacggaagcacttggcgatctggtagtaacggtcgaagccggccaccatcagcagttgcttgaacaactgcggcgattgcggcagggcgaagaagctgccggcgtgggtgcggctcggtaccaggtagtcacgcgcgccttccggggtggcccgggtgaggatcggcgtttcgacgtccaggaagccgttttcgtcgaggaagcggcggatgctggtggtcatgcgcgaacgcaggcgcagcttctcggccatttccggacgacgcaggtccaggaagcggtagcgcaggcgggtttcttcgcctacgtcggagtattcgttaagtgggaacggcggggtttccgactcgttcagcacttccagctcgtagcccagcacttcgatgccgccggacgccatgttcttgttcacagcaccggccggacgcaggcgtaccttgccggtgattttcaccacgtactcgctgcgcacgcggtcggcggcggcgaaactctcggcgcggtccgggtcgaacaccacctgggccagaccatcacggtcacggatgtcgaggaagatcaccccgccgtggtcgcggcgacggtgaacccatccgcaaagggtgatttcctgaccttccagggtctcgttcagttggccgcaatagtggctgcgcatcatggtcgtggtttcacttctcgtaattcgaaattcggtggcaggcctgcctcgtcaccgtacagttaagcaggggacggataatgcaggagcctgcgcgtagagttcaactcagtctgctttgtcgccgcccgccaggttcttcttggcgccggtcttgaaatcggtctcgtaccagccgctgccgctcaggcggaagcccggcatggacaacatcttcttcaactcaggtgcctggcaggcagggcaatcgaccagcggcgcggcgctgatcttctgaatggcttccaactgatgaccacaggaagcgcattgatagtcgtacatgggcatggagatgtctcggcgatcagatcgttacagcgccacgccctgccctgtgcataaagcccggcatgcgcagcaaagcgcgggattatatctggtaaatcaacacagcgcagccggctttgtgcccagggcccggcccgccgggatgacgggccgaccaccggactactgcttgagcgtgtctcccgtcgtgagcgcgccccggcctttgagcacatgaaccacgcacaccaccctcaccagcccgctgaagttctttacgcctccgtaacgcaaatgcacttcccgatcgacataggacaacaacgcactgaccgaacaggtattgagcctggcgatttccgtcaggatgttccaatagatctgttcaagccgcaggcaggtagaaaacccattgagcctgaccgaccgggacagtggcttggccagtcccatatcaaaccccttcgaaaaagggtcaacttttatcttgtgaaaaccacaggcttccatcactcccttacccactccacgtgacatacacctgacactccattgccaaacagcagccaacaggtttctcccattggacgatgggcctataaaacagcagccagcgcagagcagccagaagacggggagtagttagtcgtaggacaacgccaggaagcgcagggaaaccagcaggcagcgcccaaaaggcgccgcctgggtttaaccgttactggttttcgagcagggagcgcagcatccacgcggttttctcgtgaacctgcatacgctgggtcaagaggtctgccgtcggctcatcactgactttgtcgagcaatgggaagatgcctcgcgcggtacgcgtgaccgcttcctggccggccaccaactgcttgatcatctcttcggcgctcggcacaccctcttcttccttgatggaagacaggcgggcgtaaatcgaataggcacccggcgccgggaagcccagggcacggatacgctcggcaatggagtccactgccagcgccagctcgttgtactgctcctcgaacatcaggtgcagcgtacgaaacatggggcctgtgacgttccaatggaaattgtgggtcttcagatacagaacataggtatcggaaagcaggcgggaaagtccgtcgacgatggatttacggtcttcttcactgataccaatatcgattgccatgtgtttccccttcaattgacgagcattcattgatcaggtgcagctccactctaacaagagagtgcgtcatgtgcagcccggcacacccgggcgacatgcggcaaatcgccccgcaccgcctgcgggatctgacttggcaagcctgtttacctgtgggaagagtctgggcatgccaatgaaaaatcccgcacctgtctaggacaagcgtttgacgcagaaatgccgtggccgtggcaacaccccgaaatgcttgatttgagtaggcacagcctttgctgttaaatagacgcggtgtggctgccgtttattcctgcggcacgtcacataggctgatacccgcgcacgtgctcaacgcctcccattgttcagaagcgaaccgtgccagtcagctcttccttgtgatccgtcttaacgtgagttaaccaaaatgttgaaaatcgtccacctgctaacgggcgttgcagcgttgctgctgtcctttattccgagcctgcagcctgaaagcctgccctatctggaacaacacgacgccctgtacctggccttgttcggccttcttaacctgacgctcgcaccggtaatcccttactggaacaaaggcacgcgtcatcaactgcaaaacctggtcagtgcgctgctggtgctgactgttgtcgtacaaaccctcaccctcctggcgcccatgcctgaagttgggggccatccggccatcctgctcagcctggtgattgctgtggtcgccatcgttcttcacctggccatcagcttctaccgctcgtctccagcggccgcgtcgcaaaactatgacatgaccaaccgggataccgggaccgtcaagtggttcaacacctccaagggcttcggcttcatttcccgcgactcgggcgacgatatcttcgtccacttccgagccattcgtggcgaaggccatcgcgtcctggtcgaaggccagcgcgtggagttctcggtgatgaaccgtgacaagggcctgcaagccgaagacgtcatcgctgccctgccgcgtcgctgattccccagccttcgcagcaaaaaaaaaccgcgattcagccttggctgggtcgcggtttttttattgcgtgcgcattcaatagtggggcggaggcgcttcttcttcggatgactcaaactgcccgcccatttcttcctggcgcttgagcagtgcagtcatctgcaattgcaagcgttcgacggcccgctgctgggcaaccaggatgtcattgagggtttcaatggtgtcgtcctggaaggccaggcggctttccaggtcggtgacgcgttcttgcaggtccatggctcagtcctgggtaaagatgaagtcggcaggcaatagctcgcgcagtcgggtacgaatcgcggccaattgctcttgcgtatagggccgggccgggtgcttgccccacaccggggctggccaggcggcgtcatcgcgcttgcgcacaatcacgtgcacgtgcaactggctgaccacgttacccagcgcgccgatgttcatcttgtcagccgccagcccctcgttaagcagctgcgccagggctgtcgtttcttgccacaaggtttgttgatctgcgacatccagttgaaacacttcgctgataccgtcgatgcgtggcaccagaatgaaccaggggtaattggcgtcattggacagcagcaggcggcagagcgggaagtccccaatggccaaggtatcttgttgcaggcgttgatctaaggcgaacacgtgggcactccgttcggcaggtcggtaacaggcgcccagcataccttcgaatgcccaaggcttcacgggcaatgctggcggccttgaggcagccgggcaaaagaatgcaccctttagaggcagtaacccagcagagcaacgctaggccgggcctcaacggaatgcaccaaaatgacccacctgtgcctcaaagggatccgccgattacccactgataagggtcaaccggtaacgttttacccaggtacaggattcaggtaccaccgaaccggggtaacaccctggcgtcaagcccaacccaaatggcgtaaaacccccgtgcttatgcggtttttacaggttcatcacacttttcacgaaaaaatgacattcggttagtggtttgagcacgcttgttgcattcacccccatatcgtcggcaacggcacccgtttggacacaggtgtttcgcgataaaaatagtggcgtttcaatgtgtatcagggaagtgttcaaactttgaaagaagtctgaaagcagcattgaagttgtcagcctggatacattttgggctgtgaatttgcgacatggatctagcgatttacgacagcctcgtaaagaagctgaaaggatagttgagtaagtatcgtcaatagggtctgcgtgagctaactttgcgccgacacaaaaagaaagagccgcccagataaaaatacaggtgggacggcagtactcttcctaaaaccaaaggagcaaatcacgatgcgcgtgatgaagtggagcatgatcgccctggctgtttcagcaggcacctcgcagttcgcaatggcgtccgcccaggacgattccaagggttttgttgaagacagcactttcagcatcaatactcgcgcgctgtacttcagccgtgacttccgtaatgagccaggcggcggttacagcaccgtcaacggcaagcgtaagagccgtgctgaagaaaccggcctgggcttcaatgccctgtacgaatcgggcttcacccaaggcaccattggtgtcggtgtagacgtgatcggcctgatgggcctcaagcttgacagcggcaagggccgcgccggcaccggcctgttccctactggttccgacggtcgttcgcaagatgactattccaaaggaggcggcgcggtcaagttccgcatctccaacactgtgctgaaggttggcgaccaatacaccacagccccagtgtttgcctccgacgacagccgcctgctgccagagctgccacaaggcatctcgatcaccagcaacgagatcaagggcctgaagcttgaaggcggtcacttcacttccagcgtcgcgcagaaccagacctaccacgacagcctgggcctgaccaaaaccgacttcgtcggtggcgtgtatgccttcactccagaagtcaccggcagcctgtactacgcgaaaaccgaagattacttccgcaagtactacagcaacctgaattggacccacgccctgagcgatgatcagtcgttcgcgctggacttcaacatctacgacaccaagagcgatggcgccggcctgcaacgcgcagagaaagatggcgtgaccaagctcgacaaccgcgcattcagcttgcaaggtgcgtacaccatcggcgctcacaccttcaccctggcagcccagaaagtcaccggtgacggcgactacggttacggcgtagacggcggcggcacagtgttcctggccaactccatcgcccgttctgactttaacgccgaaggcgaaaagtcctaccaggcgcgttatgacatcaacatggcgaccttcggcattccgggcctgagcttcatgacccgttatgtcaccggtagcggcgccaacacgggcaccaccagcaacggcaaagagtgggaacgtgacatcgaagccaagtacgtgatccagagcggcccggcgaaagacctgagcttgcgtctgcgtcaagcgacttaccgttccggtgatggcgtgtactacggttcgccgtcgatcgatgagctgcgtctgatcgccaactacccgctgaacatcttgtaattacccgtttaattacaatgatgacctgaggcttcggcctcaaacaaaaagccgctcctctgttcaacagggagcggcttttttattgcagttttatttcaatccacaaaacaactagcaagctaagtaactagtttgtcaaagctgacttttcggccaagtttgatagcgtcacgccaagttatttcgttgcactttcctgcatcacccgaataacccgttgcggaaacggaatatcaatcccggccgctttcaaacggtcacgcgccagttcattgagcatgaacatcacgtcccaataatccggcgtgttggtccagcaacgcagggagacggtgatggaactgtcgcccaaggtcgacaccaccgccacggcggcagggtccttcagtacacgtgggtcttcggccagcgccagcagcacttcacgagctttctgcaggtctgcctcatagtccacacctacatcaaacacgaccttgcgggtcggctggcggttggtgttggtgatcaggccgttggacaggctgccgttgggaatgatcaccgtcttgttgtcgccggtgcgcaacaccgtgtggaagatctggatgctgtcgacggtacccgaggtaccctgggcttcgatccagtcaccgatacggaacgggcggaacaacaggatcagcacgccgccggcaaagttcgccaggctgccttgcaaggccaggccgattgccagggtagcggcaccgattgccgcaacgaacgaggtggtggccacaccaatcatcgaggccacgttgaccaccagcatgactttgagcgcgatgttcgcaaggctggtgatgaagtgttgcagtgccaagtcagcgttgcgcatggccagcagacggcccacgcggtgagtcaaaacattgatcagccaccagccaattgccagggtgaccaacgccagcaatacccggctgccgtattccatgatcatggggagccaagactgggaggtcttgatcaggtgatccatttcagcgttcaaatccatctactttctcctattgtgcggcgataaggctgtattgactgcctgacaacgcaattgagccccgaagggctcaattgtaggcaatgatgcttggggcgtgggacgtcaaaagtgcccacaggttccccaaagtgccatcagtcgcggaagttattgaactgcagcggcatgtcaaacgtcttggcgcgcagggccgcgatggcctcttgcaggtcgtcacgcttcttgccggtgacgcgaacctgctcgccctggatggcggcctggaccttgagcttggcgtccttgatgtgcgcgacgatcttcttcgccagttccttgtcgatgccttccttaagcacggcttcctgcttcatcagcttgccggaagcgtaggcatccttgacttccaggcattgcacgtcgatcttgcgcttgaccagggccagcttgaggatctcgatcatcgcttccagctggaaatcggcttcagcggtcaggttgacggtcagttccttttccttgaattcgaagctgcccttgcctttcaagtcgtagcgacggtccagttccttgacggcgttctcgacggcgttggtgacttcgtgtttgtccagttcagataccacgtcgaacgaaggcatgtgatttctccaatataaggggcgggctcagtagagatggagcgcgcccgagctaaaattccggggcattatagcggttctttcgcgccgttcaccgctggcgagcttatggagtacacactgatgtcgaccccctggcatattcttggcgccggcagcctgggcaccctctgggccgcacggctggcgcgcgcgggcgtgcccgtcaggctgatcctgcgcaatgaggcgcgcctggccgactatcgagccggccaggggctgaccctggtcgagcagggtgtagaacagacttacccggtagtcggtgaaacgtctgacagcccagagctgattcatcgcctgctcgtcgcgtgcaaagcctacgatgcccaaagcgccattgcccagttgcaacctcgactggcgcccgacgccgaactgatcctgctgcaaaacggcctcggcagccaggacgcagtggccgcacaagtgccgtcggcccgttgtatctttgcctcgagcaccgaaggcgcgtttcgcgaaggcgactggcgggtggtatttgccggccatggctacacctggctgggggatgcgagccaccccacgccgccgctgtggctggacgacctgcaagcagccggcattccccacgattgggccagcgatattctcacgcgcctgtggcgcaagctggcgctcaattgcgctatcaatcccctgacggtgctttaccagtgccgcaacggcggcttgcaagcccacgcgtgtgaagtggcgaccttgtgcgctgaactggccgagctgctcgaatgctgcggccagcccgccgccgcacaagacctgcacagcgaagtgcagcgggtgatccaggccactgcggccaattattcgtccatgtaccaggacgtggccaacgcacggcgtaccgagatcagctacctgctgggctatgcctgccaggcggccgcccgccatcaattggtgttgccgcatctgcaacagttgcaagcgcgcctggtcgagcatttgcgcgcacgcggattggccagcgactgaggcacgcgctaccctgcctacctgtctatcacctgggaaccccctgatgccactgcgccagcgtcttgaaaatctaccggtagggcagaaactgctggcagccctgctggtgttgttgaccaccgtattgctggtggccaacctgacgtttatcagcgccgcctactggatctcccaggaaagcatggccccccaggccttgcagtccattggtcgactggtgtccaaccccgcgctcgccgccgaggcccttgagtctccgaccaaggccgaggcgctgctcaatgagctgaccagctattcaccgttgcgcgccgccgccctgtacgacggcgaaggcaaccgcctggcgcagatgcagcacggcgaccgcctgcacctgccggaccactaccggcatatcgaagcctggcgcctcaccgaatttcgcagcaaccaggtcatcaccctaccccgcggcaaccagccttcagggcatttgttgctagtggccagcagtgagttgccggtggcgttctataccggcacgctgaccgcgagcctgggtatcctgattttcagcgtgttgttgtggctggtcatcgcccggcagatcaaacgcctgatcacccgaccgattcatgagcttgaagagctgtcccgccaggtgacccgcgaggaaaactacgcgttacgcgccgggcgtggcaaccgtgacgaaatcggcagcctggctgaagccttcaacaccatgttgtcgcgcatcgaagcccgtgagcagcaacttaaacgtgcgcgcgacgattcccaggctgcgtatgaccaggcccagggtttggccgaagaaacccggcataccaaccgcaagctggaactggaagtccaggtgcgcagcaagatcgagaaaaagctcacgggcttccagaactacctgaacagcatcatcgactcgatgccctcggcgctgatcgccctggatgaacaactttacgtcacccagtggaaccaggaagccaccgccctatccggtacgcgcctggacgaagccctgaaccaaccggtattcctggccttccagccgctcaagccgtacctgccgcagatcaaggccaccgtggagcaacacacggtggagcggatcgagcgggtcacctggatcaaggacgacgaacccaagcattatgcgctgacgttctacccgttgatgggcggcgccgggcgcggtgtggtgatccgaatcgacgacatcacccagcgcctgtccctggaagaaatgatggtgcaatcggaaaaaatgctctccgtgggcggcctggcggcgggtatggcccatgagatcaacaacccgctgggcgcgatcctgcataacgtgcagaacattcgccggcgcctgtcgcccgagctgcccaagaacctggagcttgccgagcaggtgggcatcgagctggagacggtcaaccgttacctgcaaggccgcgaagtcccgcaactgctcgacggcattcagcaggccggcgcacgtgccgcgaaaatcgtcacccacatgctcagcttcagccgccgcagcaatcgccagatggcaccctgcgatttgccggcgctgattgaccaggccgtggaaatcgccggcaacgacttcgacctgaccatcggtttcgatttcaagggccaggcgatcatccgccagttcgatccgcaactgggcccggtacccggcaccgccaacgagctggagcaagtgctgctcaacctgttgaagaacgctgcccaggccattcacctgcgggaagacgacagcgaacctgggcgcattattctgcgcacccgcctcaacccgccgtgggccgaaatccaggtggaagacaacggcatcggcatgagcgaaaacgtgcgcaaacgtacgttcgaacccttctttactaccaaggaaatcggccagggcaccgggctaggcctgtcggtgtcgtatttcatcatcaccaacaaccacaagggccagatggaagtgcattccaccctgggccagggcacctgctttaccttgcgcctgcctctggccggcagccaattgccccccactgaatttacccaactggagcactgaccatgggctttcgcctgtcgaagatctacacccgtaccggcgacaaaggcgaaacctgcctcggcgacggccgccgcgtgcccaaggaccatccacgcgtggaagcgattggcgaggtggatacgctgaacagccagttgggcctgctgctggccaaccttgaagaacaaagcggcaagcatccggcgttgaaggatgtgattgaagtgctcaccccttgccagcaccgtctgtttgacttgggcggtgagctggccatgccggtgtacaaggcgctgaatgcggcggaagtggatcgactggaagcagcgattgatcgttggaatgaagaggttggaccgctggagaacttcattctgcccggcggctcagccttgatcgcccaggcccatgtgtgccgcagcctggcgcgcagcgccgagcgccgctgtcagcacctcaatgccgtggagccgttggagggtgtggggctggcgtatatcaatcggttgtcggacttgctgtttgtggcggccagggtgattgccaagcgccaaggtgttgcggaagtgttgtggcaggcggcggccaagccacactgagcagatcgttcccacgctttgcgtgggaatgcatcaacggacgctccgcgtcccaaagcgtgacgcagagcgtcgcaggaggcattcccacgcagagcgtgggaacgatcagcacgatcagcagagcgtgggaacgctcatcacacctgcggccagaacgcccgaatacctgccacaccttgcgcaccagcctcccacgcctgctcccgctgcgccggcccaaccccgcccaacagaaacaccggcttgctgaacccggcgatcaactgctgcgcctgctcccaacccaacggctgggcatccggatgagtctgggtcggttgcaccggcgacagggtgacaaaatccacgtccatcatttctgccagcgccagctcttcagcgttgtggcacgaagccgccagccaacggtctttgggcagcggtcgacccttactggcgtatttgcgcaactgcgccgaggtcatatgccagccggcagcgggaaaatcacccagccactcaaacggccccttgagcatcagttgcgccttgccagcacacaggcccaccgcatccaccgctaggtcacggtatttggggtcgtaaccgttaggggcacgcaattgaaccagcttgatgccaccggcaatagccttctggataccgcgcaacagcgtcggggtttccagctcgccaggggtgatcaggtactcggcaggcaagcgtgccgcagcgacaatcggcgcattcgccgccgggaattcatagttgaccaggtcccgcggtgccacccacgccaacggctgcccttcagcgccatggggctcgccggtaaaagccgagacttcccagacatccagcaatacctgtttgtccggatagtcatgttgcaccttgatcagcggccgcgtcgtggtgacctggatgcccagctcttcctgcaattcacgggacaaggccgtggcaaccgactcatcggcctccaccttgccgccgggaaactcccagaggccgccttgatgctgagtatcggcacggcgcgccagcaggatcctgccatcgacaccgcggatcaccgctgctgctacatgcactcgtttcacgccactgcttcctctcgttatagccctttgtaggagcgagcttgctcgcgaagaacgtcaacgataacgcgtgcatcctggataaacgcggtggccttgagtttttcgcgagcaagctcgctcctacagggggagggtcattttcaggtacggtattccgcgttgatcttcacgtactcgtgggacaggtcggtggtccagatggtttcgctgcactcgccgcggcccagttcgatgcggatggtgatttcttcctgctgcattaccgccgaaccctgggcttcggtgtaagtttcggcacgggcgccacggctggcgatgcatacgtcgcccaggaatacgtcaatcttgctcacgtccaggtccggcacgccggcacggccaacggcagccaggatgcggccccagttcgggtccgatgcaaacaacgcagtcttgatcagcggcgagtgcgccacggtgtagcccacatccaggcattcctgatggctgccgccgccgttgacttcaaccgtgacaaacttggtcgcgccctcgccgtcacgcacgatggcctgggccacgtccatgcacacttcgaacaccgcctgcttcaacgccgcaaacaatgggccttcggtagaagtgatttccggcaggttggcctggccggtggcgatcagcatgcagcagtcgttggtggacgtatcaccgtcgatggtgatgcggttgaacgacttgttggcgccgtccagcatcaggcgttgcagcacatcgcgggaaactttggcgtcggtggcgatatagccgagcatggtggccatgttcgggcggatcatgcctgcgcctttgctgataccagtgacggtgatggtcacgccgtcatgcacaaactgtcggctcgcgcccttgggcaaggtgtcggtggtcatgatgccggtggccgcagccgcccagttatccacagacaagtcatcaagcgcggcttgcagggcgccttcgattttttccaccggcagcggctcaccgatcacaccggtggagtacggcagcacctggctggcatcgacgccggtcaactgggccagcttggcgcaggtgcgcgccgccgcgacgaggcctggctcgccggtgccggcgttggcattgccggtgttggtcagcaggtaacggatcgaaccggccacgcgctgcttggccagaatcaccggtgcggcgcagaaggcgttgagggtgaacacacccgccacggtcgagccttcagcacaacgcatcaccactaaatccttgcgccccgggcgcttgatgccggccgaagcgataccgagttcaaaaccggcaaccgggtgcaacgtgggcaaaggaccaagaccaacagccatgaatgcgctccttaaaaataggtgatgtctgtgccgtcgctatcgacggtgggaattaatggcaaaacgccgcgacggcaaaggccggtcgcggcgcggggtgttgcagcgtcaggcgaaaatcttattcgatctggccgtggcagtgtttgaatttcttgcccgaaccgcagtagcacagttcgttgcgacccagcttctggtcattgcgaaccggggtctgggccagggccacatcgacctcttcacccaaggcttcaggctcatccaggcccggcgcttcgtcgtgctggaactgcatgcgcgccgccagggcctcggcttcctgacgcaggcgtgcttcttcctcgatcgggtcttcgcgacgcacctgaacgtgggacagcacgcggatcgagtcgcgcttgatcgaatccagcaattcggagaacagcgtgaacgactcgcgcttgtactcctgcttcgggttcttctgggcgtagccacgcaggtggataccgtggcgcaggtggtccatggtcgacaggtggtctttccacaggtcatccagcacgcgcaatacgatctgtttctcgaaggtgcgcagtgcttcggcactcgcctgctcttctttctcgttgtacgcagccagcagctcggccatcagtttttcgcgcagggtttcttcgtacaggtggtcgtcttcgtccagccattgctgaaccggcaagtccacaccgaagtcgctcttcaatgccgcttccaggccggcaacatcccactgctcaggcagcgattgtggcgggatatgcgcgctgacagtggcgttgagcacgtcctgacggaaatcagcgatggtctcgccaatgttgtcggcggccagcaacgtgttacgcatgtgatagatcactttacgctgttcgttgttgacgtcgtcgaactcgagcagttgcttacgaatgtcgaagttacggccttctactttgcgctgggccttctcgatggcgttggtcaccatgcggtgctcgatcgcttcaccggactgcatgcccagggctttcatgaagttcttcacccggtccgacgcgaagatacgcatcaagctgtcttccagcgacaggtagaagcggctggaaccggcgtcaccctggcgaccggcacggccacgcagctggttgtcgatacgacgcgattcgtgacgctcggacgcgatcacctgcaagccaccggattccagtacggcctggtggcgcttctgccagtcggccttgatctgggcgatctgctcgggtgtcgggttgtcgagcgaggccacttccacttcccagttgccgcccaacaggatgtcggtaccacgaccggccatgttggtggcgatggtcagtgcgcctgggcgaccggcctgggcgatgatctcggcttctttttcgtggaacttggcgttcagtaccttgtgctcgatgccttccttgttgagcaggttggacacgtgctcggaagtctcgatggtggcggtacccaccaggatcggacggcccttggccatgccgtccttgatgtcattgatgatcgccgcgtacttctcttcggcggtcaggaacacaaggtcgttgtagtctttacgcgccaacggcttgttcggcggaatgaccatcacggccaggttgtagatctggtggaattcgaacgcttcggtgtcggccgtaccggtcatgccggacagcttgttgtacagacggaagtagttctggaaggtggtggacgccaacgtctggctttcggcctggatgttgaggtgttccttggcttcgatggcctggtgcaggccttcggacaggcgacgaccgggcatggtacgaccggtgtgctcgtcgaccagaaccacctggccttcctgcacgatgtattcgacgttgcgatggaacagcttgtgggcgcgcaggccggcatacacgtgggtcaacaggcccaggttgtgcgccgagtacaggctttcaccttcggccagctcgccgatctgggtgagcatctcttcgacaaactggtgaccggcttcgttgagttcgacctggcgggtcttctcgtcgatggtgaagtgaccttctttggtcaccacgccttccacttcctcgatgtgctgctccaggcgcgggatcaacttgttgatctcggtgtacaggcgcgagctgtcttcggcctggccggagatgatcagcggggtacgggcttcgtcgatgaggatggagtcgacttcgtcgatcacggcaaagttgagttcacgctggaatttttcatccatgctgaacgccatgttgtcgcgcaggtagtcgaaaccgaattcgttgttggtgccgtaggtgatatcgcaggcgtacgcggcgcgcttctcttccggcggctggaacggcgttaccacgccgacggtcaggccgaggaattcatacagcgggcgcatccagttggcgtcccggcgagccaggtagtcgttcaccgtcacaacgtgcacgcccttgccggacagtgcgttgaggtagacgcccagggttgccaccagggtcttgccttcaccggtgcgcatttcggcaatcatgccttcatgcaaggtcatgccgccgatcaactggacgtcgaagtggcgcatgcccatgacgcgcttaccggcttcacgggcgaccgcgaaggcttcgggcagcagcttgtcgagggtttcacctttggctatgcgggccttgaactcttgggtcttggcgcgcaattgctcgtccgacagagcaaccatctgctcttcgaaggcattgaccagctgcaccgtcttgagcatgcgtttgacttcgcgctcattcttgcttccaaaaagtttctttaacaaaggcgcaaacatatcggcaggttcttccacacatagggatggagggcgcaccgtgagtggcccgagcagccctcacggccgcattgcgaacgcgcattctacccggaatcgtgggtgaggaaagtggcgttgttccccgaggcaggcacggcgctgtgagagggcttgtttaaaataagggcttttgcgcgaacttcaacccatggagtgcagaagttacttattgatttcatgggcaaagcccagccgacgcagagcctcggggtgtgcaggcgctttctgctaagatagccgctctgttacctaaggtgtctaaacatggcatttcgccctctcacagcccgcgctcccggcgtgttgcttcgcgaagccaagccgttgaaagccatctttggccatgccaagcgcctgggccatttgcaacgcctgcttgaaagccagctgcaaccggccgcacgtgagcactgtcatgtggcgtcctggcgggaaggcaatctgctattaatcgtcaccgatggtcattgggccacccgcttgcgttatcagcaaaaacgcttgcagcgccagttgatggtgtttgaagagttcgccggtttgacgcgcattcagttcaaagtgcagccacccaccgtgccgcaaggcgcagtggggcataccctggacctgtcggaaacagccgccgaaacccttcaggccaccgccgaagggatcaacgaccctggcttgcgcgccgccctggaacggctggccgcccatgcccggcccaaagcctgaagcgctacttgcgtttgctgccgcccaataacgaaccgagcagaccccgcaccaactgacgccccatctgattggcggcctgctgcatggctgatttcaacgccttgcccgccgtggtccccaggaaggcaccggccttgtcggtgaagctcggctcttcggcggccggcgcggcctgctcggcaggcccaagttccttgcgggccatcagcacttcataggcagactcacgatccaccggcttgtcatagcgccccaacagcggcgaactggcgatcaacgctttgcgttcggcttcgctgagcggcccgatccgcgattgcggaggagcaaccagtacgcgctggacgacttctggcgtgcccttttcctgcaaggttcccaccaatgcctcaccggtgcccaactctgtgagcaccgacaaggtatcgaatgtcgggttgggccggaaaccgtccgccaccgcccgtagggatttctgctctttggcggtgaacgcacgcaaaccgtgctggatgcgcaagcccagttgcgccagtaccgtgtccggcaagtcgcccggcgattgggtgacaaaatacacgccgacgcctttggaacggatcaggcgcaccacctgctccaggcgctcctgcaaggcttttggcgtatcggcgaacaacaagtgcgcctcgtcgaaaaacaacgccagcaacggtttgtcggcatcgccgcgttccggcaattgttcgaacaactctgccagcagccacagcaggaaggtcgcgtagaccttcggcgcttcatgcaccaagcggctggcgtccagcaggtggatgcgcccacgcccatcgctggcgggctgcaaaatatcttccagttgcagggccggctcgccaaacaaggcttcggcgccctgctgctccagcactgccaggcgccgcaacaaggcctggctggaaccggtggtcatcaaggcggcgtcttcgcccagcagttccgggtgatagcgcaggtgattgagcagtgccttgaggtccttgaggtccagcagcaacaggccttcgcggtcggccactttgaacgccgcatagagcgccgattgttggctgtcggtgagttccaacaggctgccgagcaacagcgggcccatttcactgatggtggtgcgcagtgggtgaccggattggccgtggatatcccacagggtgaccgggtacgcctgggcggtgtaattaaggaagggcataccggcaatacgctcggccactttgccctgggggttggcggcggcgcccaggccgcagaggtcgcccttgatgtcggcagcgaacaccgccacgcccgcatcactgaaggcttccgccaggcgctgcaaggtgacggtcttgccggtgcccgtggcgccggcgatcaacccatgacggttggccaggcgcatggactgggcgatgggctggccgtcaaggcctgcaccgataagcagttgtgtggagtcaggcatttcgtcacctatggttaatctttagtgccgcgaggtcgatatagacggatgtaagcccgacaaagactaaaaaacggtcagataattccgatacggaccaacggagctatcaccagaaataccacaccttttttgacgctgccattttgcgcctcccgcataggatgcgcctcggatattaagaccttagcggacccttcaagccatgaacaaaaatctgcgcttcagccacaagatcctgcttgcagcctcccttatcgtcatcgccgcctttgcgttgtttaccctttacaacgactacctgcagcgcaacgcgattcgcgacgacctcaataattacctgcatgagatgggcgacgtcaccgccagcaacatccagacctggctcaccggacgtatcgccctggtggaaaacgccgcacagaacatcgccatcaaccctgaaaaaactgtcgtcgccagcctgctggagcagaaagcgctgacctcgtcattcatggccacctacgtcggtgacagccagggcacattcaccatccgccctgataccaagatgcccgacggcttcgacccacgtgttcgcccctggtacaaaggcgcccaggccagtaacggctcgaccctgaccgaaccctatatcgacgcggcgaccgggcaactgatcatttctgtcgccacgcccagcgccaagggcggccaaagcatcggcgtagtcggtggcgacctgagcctgcagaccctggtggataacatcggcgcgttggattttggcggcatgggttatgcgttcctggtcagcgctgacggtaaagtgctggtgcacccggataaagccctggtgatgaagaccctggcggacgtttatccaaaagacacaccaaagatcagcgctgacttcagcgaagtgcaagccaacggcaagaccaatatcgtgacattcacaccgatcaagggcctgccctcggtgaactggtacctgggcgtttcggtggataaagacaagtctttcgccatgctcagtgagtttcgcacctcggcggtgatcgccacgatcatcgcggtggtgatcattatcgccctgctcggcatgctcatccgcgtcttgctgcaacctctgcacctgatgacccgcgccatgcaggacattgccgacggtgaaggcgacctgacccgccgcctgaccatccagaacaatgatgagttcggcaccctgggcaatgcgttcaaccgcttcgtggagcgcattcatacctcgatccgcgaagtgtcttccgccaccgagcacgtcaatgaggtggccctgcgggtggtcagcgcctcgaattcgtcgatggtcaattcagacgaacaggccaaccgtacgaacagcgttgctgcggccatcaaccaactgggggcggcagcccaggagatcgcacgcaatgctgcacaggcttctaaccaggccagcgatgcacggcacctcgccgaggacggccagcaggtggttgaacgcaatatcaaggcgatgacgctgttatccagcatgatcagcacctccagtaccaatatcgaagcacttaacagcaaaacggtgaatatcggccagatccttgaggtgatcaccagcatttcccagcaaaccaacctgctcgcgctcaacgcggcgatcgaagcggcgcgcgccggcgaagccgggcgtggctttgcggtggtagccgatgaagtgcgcaacctggctcatcgcactcaggagtcggcgcaacaggtgcagacgatgatcgaagagctacaggtgggcgctcgggattcggtgagcaccatgagcgaaagccaacgccacagcctggacagcgtggaaatcgccaacctggccggcgagcgcctgaacagcgtgacccagcgcattggcgagatcgacggcatgaaccaatcggtcgccactgccactgaagaacagacctcggtggtggagtcgatcaatatggacatcaccgagannnnnnnnnnnnnnnnnnnnnnnnnnnnnnnnnnnnnnnnaatatggacatcaccgagatcaacaccctcaaccaggaaggggtggaaaacctgcaatcgaccctgcgcgcctgctcggacctggaacaacaggcctcgcgtttgaagcaattggtgggcagttttcggatctgattaacaacaccgaccattaaaacgaacgcaaggcgatccaatgtgggagcgggcttgctggcgaaagcagtctatcagttgaagatgtactaactgactcaccgctttcgcgagcaagcccgctcccacaggggacctgcgtttaaccgaccggcaaacacaccaatcccaatcgaacatctatccttacctcaggtccatctagggagagcaatggatcggagggatgttcatcgtgcatatcgctgacataaccatgttctacgccccggccagcggtggcgtacgcacttaccttgacgccaagcaccggcgtctggcgctcaagccgggcattcgccacagcctgttgatccccggcgcacatttgagcgagcaggacggcatcttcaaagtaccggcgcccgccctgcccttcggcaaaggctaccgtttccccgttcgcttggcgccatggcgaaatgtcctgcacgatttacagcccgatctgatcgaagtgggcgacccttacctgaccgcctgggcagccctggatgcccggcgccagttggatgtgccggtcatcggcttctaccactccgacctgccactgctggtgagcaaccgcatggggccttggtttacccccaatgttgaagcctatgtgcgcaaactctatgggaattttgaccgagtgctcgcccccagccaggtcatggccgacaagctcaccgggcttggcgtcagaaatgtcttcgtgcaacccctgggcgtagacctgcaaaccttcacccctgaggtacgtgaccccggcctgcgcgccgaactggggattggcgaagacactcggctactgatcttcgccgggcgcggctccaaggagaaaaacctgccggtgctgctcaactgcatgaagcgcctgggggatggctaccacttgctgctggtgggctccggcatgccggccagcgtgccggacaatgtcaccgtgatagatggattccggcccgcccagcatgttgcgcggctgatggccagcgccgacgccttactgcatggcggcgaccaggagaccttcggcctggtgattctggaagccatggcctgcggtattccggtggtcgccgtggcggccggggcctttaccgagattgtcgatgagcgttgtggcctgctgtgcgcgccgaacaaccccaaggccatggccgatgcggtgcgcgagctgttcagtaccgacagccgacgcctgggggcccaggctcggcgccatgtcgagcagcactatgcgtgggacacggtagtcgacagcctgttggggcattactacgccgtgctgggcagccatgaaccgatgctcgcccatggctgagcgcgcgctgatgctggtactgcacgacgtggcaccgcacacctgggccgactaccggccctttgtcgaggccgtcgacgcactgggcaacgtgcccatcacttggctggtggtgccggacttccatcaccatgacgacttggccgcccaccgcgattttcggcgcctgctcgatagccgtgtcgccaagggcgatgaactcaccttgcatggttactaccattgcgacgaccaacctcggccgcgtacgccaaaagaatggtttatgcgacgcatctatacccacgaaggcgagttttaccagctgtccgaagccgaggcgttgcggcggctgaccgccggcattgaggtattccagcgtaatggttggccgctgcatggctttgttgcacccgcctggttgatgagcgacggcacccggcaggcattgcgccagttgccgctgagctacaccagcgacccacaacatttttatcgcctgccggacttcacgcctatcaacgcccccggcctggtgtggagtgcgcgcagtgcctggcgccggggattatccaaagtcctcagcgaccgccgggaacagcggtggcagaaggccccgctgatccgactgggattgcacccggtggacatgcgccacaggttttcccgcgattattggctgcacaccctgcaacgcctgctcaacgcggggcgcgtcccccaaaccaaggccgcctggctggcgacgcagccatgggccgactgatctggttaatgttggcgctcttggtggcgctggtgatcccactgtggctgggcggcggcgatagcattacacgcctgcgccagtttccgctgccccagttgctggggatgttcaccatgatcatcggctgttggctgatcaacagcctgcgcatccgcctgttgcttggcgagcatcgcgctcggttagggccgctcaaaagcctaggcgtggtgatatccaccgagttcgccatgtgcgccacacccggtggcagcggcgggccgttgaccctgatggcactgctggcacgtcacggcgtgcgccccgcccacggcagtgcggtgttcgccatggaccaactgagcgacttggtgttttttctctgcgcactggtgggcatcctgctgtatgcgctgtttcatagcatcagcccgcgtatggagtggttgctggggctcagcgccgtgtcgatggtgggtggggtgatcagtggctgggccgtggtgcattttcaccgacggctgattcgcctggcgggtttggcactcaaggccatgaaggtcggcgctaccgcccgccgacactgggcacgccggttgctgcgttttcttgcggcgttcagcgccacgctgaaacttccccggagcaccttgcttggggtctttgcgctgaccagcctgcattggttgctgcgttacagcgtgctgtacctggcgctgcgcgggttgggcggtgaggtgcagtgggcctggagttttctgatccagatgctgtcgctgactgccgggcagttcagcctggcgccaggcggggccggcgcagcggagctgacgtgcgcggcactgctggcgcccatggtgggcacatccacagcggcggcggcgattctgatctggcgagcggtgacctattacttctatttgctggccggtgcgccagtgtttttattgatggtcggcaaaccgctgctcaagcgtctttttcaggggcggcaggcggctcgtcctgcgcctgtgtctgctcccataaacgcgccgcgcctggaaaatcagttccatcctcggcatccagcgcctccgggtcgtaacgactcaaacagccctcgcccaaggtagcaggcgcccgggaggtggctttatcgagcgggtcgctcatgggaatctcctgaaacagaaataaaaaagggcctggagagttttacctccaggcccctgcgtctttcaatcaaaaccgctgagtcagaaaaccacggtcttgttgccgtgcaccaacacgcgatcttccaggtggtagcgcaagccacgcgccaacaccattttctcgacgtcacggccgaagcgcaccatgtcttcaatactgtcgctgtggctgacgcgcaccacgtcctgctcgatgatcgggccggcgtccagctcttcggtcacgtagtggcaggttgcaccaatcaacttcacgccacgcagggaagcctggtgatacggcttggcaccgacaaacgacggcaagaagctgtggtggatgttgatcactttgcccgcgtattcgcggcacagctgcggcggcaggatctgcatgtagcgcgccagcaccaccacatccgcgtcgtgctgcttgaccaggcgcgacacctcggcaaatgccggctccttgtcctgtgggttgaccggcacatggtaataaggaatgccatgccattcgaccatgctgcgcaggtcgtcgtggttggagatcacgcaagcaatctcgcaatcgagttcgtcgctatgccagcggtgcagcaggtctgccaggcagtgggattcgcggctggccatcagcaccacgcgtttcttctgctctgtatcagtgatgtgccaggtcatcgaaaactcttcggcaatcggcgcaaacgcctcgcggaaggcttccaggccaaagggcagcgtatcggcacggatttcgtgacgcatgaaaaaccaaccactgagatcgtccgagtgatggctcgcctcggtgatccagccattatgggaagccagaaagttactgaccttggcaacgatgccaacccggtccgggcaagcaatcaccagccgaaaagtgcgcattaggggaaaactccagaacttcacaaaggcggctattctagcgattacgcaaaaaaactgcagtattcccttgcacctgatcttgagccctcgccgtggcaacaccccttaatcgtgtaaggttttaccaccgctatatgacggtacaacggtatgctcaggccagtagcaaaaaattaacgcgattatctttgcgcataacgcgttctaattaactcatcggccaggttttctcacacacattcaatgtcattcgcctgaataacgtcttaaatgtttacttgatgaaattgcctgactattattaggccactcaccctgtcaatcagcgttctacataaggtagtccacatgtcactgatcaacgaataccgcgccaccgaagtagctatcaaagagctgcaagcccgtttgaagaacctgtccgaagacgacaagctgaaaaccgagctggaattcgaaggcaaattgcgcaccctgatgggtgaatactccaaatccctgcgtgacatcatcgcgctgctggatccagagtcgaaagttaaagcaccacgtggcgctgtgaaaactaccggcaccaagcgtgctcgcaaggtcaagcagtacaaaaacccgcacaacggcgaagtgattgaaaccaaaggtggcaaccacaaaactctgaaagagtggaaagccaagtggggcggtgacgtagttgaaggttgggcaaccctgctgggctaagcccggtcggacgttcacccgatacgtcacacatgaaaaacgccagcttgctggcgttttttattgtcggaatattctgtagttatgcgcctacagattcaggcgcgccgctaaggaatctacatagtcctgccattgcgccagtacctgacactgaaacgatgtagcactaaccgccaactcctcacgcgcctgcttaaatcccaacagggtattcggcgccccccactgcgcatccgacaaacgttgctgacagaaaagtttccagcgttgttgctcctcattgttcaaggtttcaggaaagttacgcgcccggtagcgaaataataattccggcaaacgatgatcatcgaacggccactgctgacgggccaactgcgcaggctccgccatgcgaacttgctcacataaacgacggtcacggtcaccaataaaaccatcgtagagctgctgctccgggtccgcgttcggcgcaaagtcttcctcggcataaatggccgctaacttgtcccgccaaacttcctgtgcgtcagttagccgcagcgcccgcgcaaggcaagcctccttatccagttgcaggcgctccagatcttgcgggcgcagcacctttaacggcgcgaccaccgggcagcggttgatatgcagcaacttgagcggaaccggcagctcaccttcggccaactcatcgcggcgcgtgtaaaggcgctggcgcagggtcgccgcatccaggtccaacagcccttgtggatcgagccccaggtcacagacgatcaaggcattgcgattgcgcgggtgccaggccaggggcaagaccacgcccaggtaatggcgctcggcagagaaacgcccggagatatgcaccatcggttgcagcaaccgcacctcatccataacccgctgtttgctgcgcagttgaaacaaccactcatacaacttcggttgcttgtctcggaccaaccgcgccagggcgatggttgcacgcacatccgacaacgcgtcatgggcctggccatggtcgatgccgttggcctcggtcaagcgttcgagcttgagggtcacgcgcccttcctgctcgggccagttgatgccctccggccgcagggcgtaggcggtgcgcatgacatcgatcaagtcccagcggctgttgccgccctgccactcgcgcgcatacgggtcgaaaaaattgcggtacagactgtaacgcgtcatttcatcgtcaaatcgcagggtgttgtagccggcgccgcaggtacctggcgcggccagctcggcgtgcacccgagtcatgaaatcggcttcggcaaggcccttctcggcgaggatacccggcgtgatacccgtgatcgcgcacgctgccggatgaggcaggatatcgtcgctgggctggcaatacagattgatcggcgcaccgacctcattgagctcaaggtcggtgcggataccggctacctggagcggacgatcgttgcgcgggttgatgccggtggtttcatagtcgtaccagaaaatcgaggtcacgggctattcctgtgctgaagaccgacaaagtctaggcgctgcaaggcgtttggggccagcgataccttactgtataaatatccagaaaaacctcgggtggttgcttccatcctcgacactgctagcatccgtgtttctaagtcgcctcgcactgccaaggatcgcaatgccatcaacgcctttggatacccactatcagatagaaacgccggagggcatcgacctgcccctgcgccctgctggcctgccctcccgggcattggcgtttgcattcgacctgggcgtgcgcgggatcatcatgggtatcctgctggtgccactggcgttgctcggcaatgtgggggtcgggctgggttcgctgctgctgttcctggtgagctggtggtacatggtgttgttcgaagtgcttaaccagggctgctcgccgggcaagcaggtcatgggcctgcgcgtggtacaggatgacggcacgcccatcggctggtcggcatcgctgatccgcaacctgctgcgttttgtcgacatgctgcccttcggttatttcctcggcgcgatcagctgcctgcagcatccgcacttcaagcggctcggcgacctggcggccggtacgctggtggtataccgcgaactgccgctggcacgcccaagcatccctcaagcacccgccctgcgcctgcccttcgcactggcgttgagcgaacagcgggccatcctcggtttcgccgaacgccaggccgagctctcggccgaacgggtgcatgaactggccgccatcctcgcagagcctctgcaggtgtctgcaccgcgtgccgtggagcaactcaacggtgtagcccgtggtttgttggggccgacatgaagcagagcctttttgaaagccgccaccaacaccaatggcaaactttcgccgagcagttgacgcaactggagcaaggtaaagccaaggccaccgacgttgccgacttcccgcatcaatatcgacgcctgtgccaacacctggccctggctcaacaacgcggctacagcagttacctggtcgacccgttgcaacaactggcactgcgcggccatcaacaactgtatcgccatcgcagccaactgacggcaaatatactggcgtttcttctcgccgacttcccacgcctggtacgcgaacaatggcgcttcgtgctgatcgccggcctgctgttctttggcagcctggtggggatcgccctgctggtgtacctgttccccgacctggtctacagcatcatcagcccccagcaggtggccgagatgcaggggatgtacaacccagacgccagccgcctgggccgcgctgccgagcgtgccgccagcgaagactggatgatgtttggctattacgtgatgcacaacatcggcattgccttccagacctttgccgcaggcctgttgtttggcctgggcagtgtgtttttcctgattttcaacggtctggtcataggtgcggtctccgggcaccttaccgacatcggctatggccagactttctggtcgtttgtcattggtcacggcgcattcgagttgaccgccatcacactggccggtgccgcgggcttgcaactgggctggtcactggtcgcccccgggcgcttggcgcgcagcgaggccctgcgcctggccgcgcgcaaaagcgtacggatgctttgcggtgtcatggtgtttctgttgatcgcagcctttatcgaagcctactggtcctcaaccactcgcattgagccctggatcaaatacgcagtaggcgtcgcgctctggctgctggtggccgcttacctgaccctggccgggcggagtcgccatgcgcctgactgacgccagcgtagtgattcgcccgcgcacttcctgggaagccatggacctgggggtgctgatggccagggaacaccgcgccctgctgatgggcagttgggcgctggtgagcctgccggtattcagcctgttgacagtgctgctctggaattacccgtctttggccatgttcctgttctggtggctcaagccggccttcgagcgcttgccgctgtatattctttccaaagccctgtttggtgagccccccggcctcaaacaggccgttcgccattggccgcaattgctcaaggggcaactgttcgccagcctgacctggcggcggctgagcatgagccgcagcttcaccctgcccgtcagccaactggaaggcctgggcggagacgcccgtcaacgacgccttggggtgttgctgcaacgcaacgctggcgccgcacgctggctgacgacgatcggcgtgcacctggaaatcggcctgtggtttggcgccatggccctgttctatctcttcatcccgcaacagatcgaactggactgggactggcaacggctgatattggcgtcaggctcggacgtgctttggctggagcacctgagcaatgccttctacgccctgatcctggtgttctgggaacctatctatgtcgcctgtggcttcagcctgtacctcaaccgccgcacggtgttggaggcctgggacctggaactggtattccgtcgcctgcgccagcgcctgagcaacgtcgcaccgctgttgttgctggtcgtcggcttggcgctgctacacgtcagcccacccgccatggcagatgaagccacagcccataagcccctcagcacccaggccgccagccaatccatccaggcattgctggaaaagccacctttcaagaacccggaaaccgtcacacgctatcggtttggcgaagaaaaaacgccggttaaaaacaaggccaagggcgacggcaggttacctggctggctccaggcactgctcgacaacttcaacagcgacaccttcaaatacgtcgccaaaaccttggaaatactgctctggagccttgtgattggcggcctggccctggtgtgctggcgttaccgtgaatggttgcgcaccttcgtcagccgccttggacctactcgcacggccgctccctcgcccgttcctgcccaactgttcgggctggagctgggcaccgagacattgccccaagacatcgccagtaccgccgaacagctatggcccacccagccccgggaagctcttggcctgctgtatcgtggtttgctcagccggctgttgcatgagttcgacctgccactgacaaacgccgataccgaggggcaggtgctggagcgtgtccatcatttgcaacaaccgcagttactcgcgttcagcgacgaactgacacgccactggcaaaacctggcctatggtcaccgcctgccgcctccttcagcccaacaaaaactgtgcagcgattggcgtgctctcttcagtggcggagcgggccaatgaatcgcgcgttattgtggatagcgctgttatcggcatgcctgttgggtgcgggcggcctttatgcctggcacaaggcaattccctacgaggaagtggtagatcgcggcccgtcaccagaggcacgcgccaacccttacctggccgctgagcactttctgcgccagcaaggcgtggtggtggcgcatgccaatggccttgaacgactcgccgagctgcccgccaaaggccatagcctgttgctgctgggggagcgcagcaacatgaccccgcgccaggtcgaacaactgctgggctgggcaaaagccggcggccacctgctattagtcgccgaagcattatgggatgaggaaaccggcaccagcggtgacctgctgcttgatcgcctcactgtccgtcaaaccttgagcgacgccttcgacgaacccgcgccaccgcgtaaaaaaaccaagccggacctgaccaagctgtatgtcgacaacgaaacggcaccggcctatttcagttttgacaccgacttcaacctcaccgaccccaagcatctggcgcagttttccgccaacagcgccaagtccagccacctgatgcaacttgaccttgggcaaggccgcgtaacggtgatcaccgacagcgacctgtggaaaaccgcggatatcggcaaacatgataacgcctggttgctgtggtacctgagccaaggcactgacgtcaccttgctgttcaacagcgacacagacgacctgtttaccctgttgttgcgttatttcccccaggccctggtcaccctgattgcgctggttgccctggggctgtggcaggcaggcatgcgccacggcccggtccaggcaccggcgcccaaggcgcgtcgccagttgcaggaacacttgaaggccagcgcggatttcctgttgcgccgcagtggccagggcacgttgttgaaagccttgcaacacgacattctgcgcgcagcccggcgacgccatcctgggtttgaacacctcgatgcgccagggcaacgccaagtgctggagcaccttacgcgacaaccccctcatatcatcagccaggcgttagagcccgttgcgctgaagcggctttccagcgccgacttcagccgacaggtggcgtgcctgcaaaccctcaggaatgccttatgagcgactctccactggccaccgccctgaccgccgaaaaccttcagcatgccagccagcaggcccaggcgctgcgcgtggaattgcgcaaggccgtgattggccaggaccttgtgattgatgacgtactcaccgccctgatcgcaggcggccatgtactgctcgaaggcgtgcctggcttgggcaagaccttgctggtacgcgccctggcccgctgctttggcggtgatttcgcccgtatccagttcaccccggacctgatgcccagcgatgtcaccggccacgccgtgtacgacttgcagaccgaacagttcaaactgcgcaaggggccgttattcacccacctgctgctggccgacgagatcaaccgggcaccggccaaaacccaggcagcgcttctcgaagccatgcaggaacgtcaagtgacccttgagggtgaggcattacccatcggccaaccctttatggtgctggcgacccagaaccccatcgagcaggaaggcacctacccactgcccgaggccgagctggaccggttcatgctcaaggtacgaatggactacccagatgctctacaagagctggatatggtccgcgaagtgacgcgctcgtccaaggccgacatgctggaggtacagccgttgcgtacggtgctgcaagccgaggacgtagtaacgatgcagcaaattgccagtgacctgccgttggatgagcaggtgctcgactacgccgtgcgcctggcccgtgccacgcgcagttggccggggctggccatcggtgccggccccagggcctccattgccctggtacgcggcgcccgtgcccgtgcgctgttgcgcggtggcgaattcgtcacccccgatgacatcaagggctgcgccctggcggtactgcgtcaccgggtacgcatcgcacccgaactggacatcgacggccttgaagtcgaccaggtgctccagcagttactcgaccagattgcagcaccaaggcaatgacgcggccatgaaaccgactcgtctgctgctgacctggctgggcgttctgctcggcttgaacatcttgatgggcgcctcggcagcgttgcagttcaaagtgcccgccaccttgcattcggtagcctggggcctgctgctggccctgttgctgctggcgatgctggatgctgcacgcttacgtcgccgcccttcggcccgcgtgtacagggcattgcccggtagcctggcgctggggcgctgggaagaaatacgcctgtgcctggagcacgactacccgcaaccactgaccgtgcaggtgttcgatcacgtgcccgatggcttggctgtggagaacctgcctcaattcattcaactacgccccggtgaacgtgctcagttgggctatcgcgtgcgccccttgcggcgcgggcacttccatttcagtcgctgcgagctgctgctgcccagcccactggggctgtggtctgcacgacgctgggtcgttacccacgatgccacccgcgtttacccggatttcgcacgtttatacggtgcgcagttgcgaggtgtggataactggctgagccaactgggcgtgcgccaacatcagcggcgaggattgggcctggagtttcaccaactgcgcgagtttcgtgaaggcgacagcctgcgtcagatcgactggaaagccaccgcccgccaacgaacgcccattgcccgggaataccaggacgaacgcgaccagcaaatcgtgttcatgctcgattgcggccagcacatgcgcagccaggatgatgaactgtcccattttgaccacgcgctcaatgcctgcctgctgctgagctacgttgccttgagacagggcgatgccgtagggctgtgcacgtttgccagcgaccagccgcgctacctgaagccggtcaagggcagtggccaattgaacctgttgctcaatgcggtctatgacctgcagaccacgcgaaaaaccgccgactaccaggcggccgccagccagttgttggcacgtcaaaaacgccgggcgctggtgatcatcgtcaccaacctgcgggatgaggaggatgaagcgctgatggctgccgtccagcgtatcggcaggcatcaccgggtactggtggccagcctgagggaagaggtcctcgaccaactacgccaggcgcctgtgcagacactgcccgaagcgctggcttacagcggcacgatcgattacctcaacacccgcaaccaacgccatgatcgcttgagtgctcatggcctgtcggtgctggataccttgccatcggcgctgggtgccgggctggtcacgcgctatctggagtggaaaaaggccggggtattctgaggatgactgcgcaggggcacgcccaggaaacggccacgaccccacgcataattcagacagaggcctgcaaaggataaaagctgaagtactgcaacagcgcgttgatcaggtgccggtactcttcgggcgcctcaagcacgctgaaccccgagtcgtaatgctgcggggtgacatcttcatggctccacaagcaggttgccgtgaggtcaattgccttgaactcgccctgcgccaccggcactttcaagcgcagctcgaaatccacgtcggtcatcatgggtaacgagctgatcagcatcagaccgttttcagacacatttccaagatagccgattggcttgtcagtaatacgattgaacacctgcagaaaatacggcagttgatgccgctcgatccgtcgttcggtaaacatggtgaagtcgccatccaatagccaaaaatctggccgtgccagtgattcggaacaagcaatcgctcgctctccctggatctcggtgtgacaacagctaccgcttgtcaccaaacagctgccgaatccgggcattgcatccgttcgaatgggtactgcacaaacagacattcaaagaatagcgcaagactggcgacaggccagccatgaagcgacaaatacccttacaacgactcaggccttggttttgccaggcctgcagccggcagatgccccagttgctgcaaggtatcgagccgcgcacgggctcgataggcgtactcgctcgacgggtagtggccgatgatgaactgataggtctgtgcggcatcgacaaagagtttctggcgttccaggcactgcccacgcaacatcgaaacctccggttgcacgtagcggcgagttcggctctcgcgatcgacctgggacaactccagggtgacacgctggcaatcaccgaccccataggcgcggtaagcgttgttcaaatggtggtccatcgaccagcgggtacagccgacaacactgacggccagggcagcaacgagcaaaattcgcatggggttctcctgtcttgtgcagtgtatcgacccctggtcgaaaatcttcaaggcgtttgcccattcaaccgcagccaaaacaagccaatcgtcgataagtagtgcaaacgaacaatgactacaacgaaagagcatagtagccttccccagcgcttgaactcaggagtccgtgcatgtccgtccgtcgtaccaaaatcgtcgccacccttggcccggccagtaactcgccggaagtcctcgaacagctgattctggctggtttggacgtcgcccgtctgaacttctcccacggcaccccggacgagcacaaggctcgcgccaagctggtgcgtgacctcgccgccaagcatggccgcttcgttgcactcttgggcgacctgcaaggcccgaaaatccgtatcgccaaattcaccaacaagcggatcgagctgaagatcggtgacaagttcaccttctccaccagccacccgctgaccgaaggcacccaggacgtggtgggcatcgactacccggacctggtcaaggactgcggcgtcggtgacgaactgctgctggacgacggccgtgtggtgatgcgcgttgacactgccacgccgaccgaactgaactgcaccgtgatcatcggcggcccgctgtccgaccacaaaggcatcaaccgtcgcggtggtggcctgacggcgccggccctgactgaaaaagacaaggccgacatcaagctcgccgccgaaatggaagtggactacctcgccgtgtccttcccgcgcgacgccgccgacatggaatacgcccgtaagctgcgcgacgaagccggcggtaccgcctggctggtagcgaagatcgaacgtgctgaagccgtggccgatgatgaaaccctcgacggcctgatcaaggcctccgatgccgtgatggttgcccgtggcgacctgggcgttgaaatcggtgacgccgagctgatcggtatccagaagaagatcatcctgcacgcacgccgtcataacaaagcggtgatcgttgcgacccagatgatggagtcgatgatccagaacccgatgccgacccgtgccgaagtgtccgacgtggccaacgccgtgctcgactacaccgacgccgtgatgctctcggctgaaagtgccgccggcccgtacccgctggaagccgtgcaggccatggcgcgtatctgcgtcggtgccgaaaagcacccgaccagcaagacctccagccaccgcatcggcaaggttttcgaaagctgtgaccagagcatcgccctggctgccatgtacaccgccaaccacttcccgggtgtcaaggccatcatcgccctgaccgaaagtggctacacgccgttgatcatgtcgcgcatccgttcctcggtgcctatctacgcgttcaccccacaccgcgaagcccaggcccgcgcggccatgttccgcggcgtgtacaccatcccgttcgacccggcgtcgctggcaccgaacgaagtcagccagaaggcgatcgacgagttggtcaaacgcggcgtcgtggagaaaggcgactgggtcatcctgaccaagggcgacagctaccacaccaccggtggcaccaatggcatgaagatcctgcatgtgggcgacccgcaggtctgagtgaaaggctgaaaaacaaaagccccgccatgtgaatggcggggctttttgcatttcactgcaagccaatatgtcgaatttcagggcctcatcgcaggcaagccagctcccacagtagtccgtgtctggtcagacaattcggtctactgtgggagctggcttttcataaattggaaggactggacagaaacacatccgccagcaattgattacgcggcagtcccgccagaaacaagcgcttggaaaacgcctcgacgctggcggggtgcccgcagagcaaggccagggtttgccgggaaacaagccgcagttgcgccaatgccggctgcaactgcgccgcagtccatagctccacggtcaggttcccatgcttggcggcaagggctgccaggggtttagtcaggtaatgagcctcggcctcatgggcgaggtgaatcacgcgaatctcgccttggtgatcctggcgcagtgcctcgcgcaacaccccccataagggccccaggccggtaccggaggccagcagccacaatggccgcgattgccagtcgggatcatagtgcagcgctccgccccgcagttcgcccaggcgcagaggctcaccgaccttcaactgtcgcgcggcatcgctgaatgcaccaggctggcggcactcgatatgaaactccaggtacggctcctcctgaggcaggctcgccagagaataagggcgcgccacctgccccgcccacagcaccagatgctgcccggcgctgtaccgcagagcacgttccggttgcaggcgcaggcgcagtaccgtcgaactcagccaatcggcgcccaccacctgggcgggcaggccatcgcgctgggggtcaaacgcttcgaccttcaggtccgcactgacccggcactggcacgccaggcgccaaccttgctggcgttgcgtcgggctgagggcttcgggctgctggtcgtcgaccttaccctcgcaacgcaccaggcacgcatggcaactgccggctcggcaactgaagggcacggccacgccggcctgattcaaggcatccagcaggttgctgccggaggtgaccgaccagtggcgttcgccgacgtagagttcaggcataacgccgttacctctctaggtaggagcgagcttgctcgcgaagatcgctaacgataacgcggacaaccagatgaaacccaccagattcacgcttttcgcgagcaagctcgctcctacagataaccgggccgggcattcgtgaccatagtcgggtgtatcggccaccgtgccgggttatactgccgcgcctttttagcgtcgcgcctgcaccattctggcgtgccttggaaagatggcttcagccgaccgatgcaacactgacgccatctttattgaatgttcccttatagaggagcgcgactcatgaccgtgatcaagcaagacgacctgattcagagcgttgccgacgccctgcaattcatttcctactaccaccccgttgacttcatccaggccatgcacgaagcctacctgcgcgaagaatcgccggcagcccgtgattccatcgcccagatcctgatcaactcgcgcatgtgtgccaccggccaccgcccgatctgccaggacaccggtatcgtcaccgtgttcgtgcgcgtgggtatggacgtgcgttgggacggcgccaccatgggcctggacgacatgatcaacgaaggcgtgcgtcgcgcctacaacctgccggaaaacgtcctgcgcgcctcgatcctcgccgacccggccggtgcccgcaagaacaccaaggacaacaccccagcggtcatccactactccatcgtcccgggcaacaccgtggaagtggacgtggcggccaagggtggcggttccgagaacaagtcgaaaatggccatgctcaacccgtccgactcgatcgttgactgggtgctcaagaccgttccgaccatgggcgccggctggtgcccacctggcatgctcggcatcggcatcggcggcaccgccgagaaagccgcggtaatggccaaggaagtgttgatggagtccatcgacatccacgagctgaaaaagcgcggcccgcagaaccgtatcgaagaaatgcgcctggagctgttcgagaaggtcaaccaactgggcatcggcgcccagggcctgggtggcctgaccacggtgctcgacgtaaagatcatggactacccgacccacgccgcctccctgccggtgtgcatgatccccaactgcgccgccacccgtcacgcgcacttcgtgctcgacggtacgggcccggcgtcgctggaagcgccaccgctggacgcctacccggaaatcgtctgggaagccggcccatcggcccgtcgcgtcaacctcgacaccctgaccccggaagaagtgcagagctggaagccgggcgaaaccgtactgctcaatggcaagatgctcaccggtcgcgacgcggcgcacaagcgcatggtcgagatgctgaacaagggcgaaaccttgccggtggacctcaagggccgctttatctactacgtcggcccggttgatccggtgcgcgaagaagtggttggccctgctggcccgaccaccgcgacgcggatggacaagttcacccgccagatcctcgagcaaaccggcctgctgggcatgatcggcaaatccgagcgcggcccgaccgccatcgaagcgatcaaggaccacaaggccgtgtacctgatggccgtgggcggcgccgcttacctggtggcccaagccatcaagaagtcgcgcgtggttgccttcgccgaactaggcatggaagccatctacgagttcgacgtcaaagacatgccggtcaccgttgcagtggacagcaaaggcgagtccgtccacatcaccggtcctgccatctggcagaaaaagatcagtgacagcctggcggtagaagtgcagtaagcacctgctccaaaagaaaaaaggcgactgcagccccatggcccagtcgccttttttatgcctgaagcaagggagctgctcatgctcttgctctgcttttgatcttgatcttgatctcaggcgccccgttaaaccacgctggccggaattcgacagggatttggggggggtaaaccggcagggatgccggtttagccgcccaaatcactggcggattacgggcacaccgagcctaagcgaggtgccgagtggtggggcnnnnnnnnnnnnnnnnnnnnnnnnnnnnnnnnnnnnnnnnattacgggcacaccgagcctaagcgaggtgccgagtggtggggcaagagccctttggttactttgggcagggccggcattccggctcttctccaaagtgacccgccgtcagggcggaaccctaagtagccgttaccaaaagaatggatatgtacacaatccaactgtgttgactgtcaggccgccttcgcgagcaagcccgcacattggaatcgtggggtgtcaggtagatagccgtcggctggcaggccgtcatcgcaggcaagccagctcccacacaagcgccttggccacaagatatgtgccgcccatgctatggtgctcgccccttaccgtgcctgttcatcatcgtatgatcgtgatccctcgccccctgcgcctgaccttctattccctgttgatcatcgccggtgcggtgctggccgccgccttggccacgcgccatgccgaacgccaggccttggtggacgacgccgtccgtgccaatcagcagctcgcgctgtatgccaactcgctgcacaccctgatcgaacgctaccgcgccctgcccgccgtgctggcgctggattcggagatgatcagcgccttgaagggcccgctggacgccgctacgcaagaccggctcaaccgcaagctggagcgtatcaacggcgctgcgcagtcttcgaccctggaactgatggaccgcaccggcctggccgtggccgccagcaactggaacctgcccagcagttatgtcggccacaattacgcgttcaggccgtatttcagccagaccctgagccaaggcaccgggcgcttttatgcagtgggcgttaccacgggtattccgggttacttcctgtccagtgcggtcgtggatgagcacgagcagttcctcggcgccatggtggtcaagctggagttccccgagctggaacgcgaatgggcccagggcaatgatctgctgttggtcagcgatgctcggggcatcgtgtttatcgccaaccagccgggctggcgttatcgcaacctgcggccgttgtccgaaaatgacctggccgaactcaaggccacccgccaatacgacaaaaagcaactgcagccactggacacccagcccctgcaacgctttgacgaaaacagccacttgatccgcgtcaacggccccgacggcaacgccaattacatctgggagtcgctggcgctcaagcgcgaaggctggaccctgcacctgttgcgcaaaccccagtttgcctttgaagaccaacgcaacgcgggccttgccgctgcgggttcgtggctggcactggtgttcttggtgctgttcctcagccagcgctggcgcctggcccgcttgcgccagcgcagccgtgaagaactggagcaattggtccaagaacgcacccaggcgttgcgcaccgcccaggatggtctggtgcagtcggctaagctggcggcactggggcagatgtcagccgccctcgcccatgaaatcaaccagccactgaccgcccagcgcatgcaactggcgacgttgcggctgctgctcgaccatggtcgcgtggacgatgcctacaaggccctcacaccgctggatgacatgctcacgcgcatggccgcgctcaccggccacctcaagacgttcgcgcgcaagagtcccagtggcctgcgcgaaaagctggacctggcgacggtggtcgaccaatccttgcacctgctcgacgcacgcctgcgtgacgaagccatcggtgtggtgctggacctcacccgcccggcctgggtacgtggcgacgcgatccgcctcgaacaggtgctgatcaacctgttgcgcaacgctctggacgccatggccgacaaaccgcgcaagcgcctggaaatccgcctgcacgccgatcagcagctgtggcagttgagcgtctgcgacagcggcggcgggattgcagaagaacacttgggcagtgtgttcgacccgtttttcaccaccaaaccggtgggcgacggactcggcttgggactcgcggtgtcctacgctatcgtgcatgaactgggcggacgcctgagtgccgccaaccgtggcgatggcgcgattttcaccttgaccctgcctatcgccctggagacgccagacctatgttgaacgctgtgattgtggtcgatgacgaagccagtattcgcacggccgtcgagcaatggctgagcctgtcggggtttgacgtgcagttgttcagccgcgccgaagagtgcctggcgcaactgcccaaggactttgccggggtgattctgagcgacgtgcgcatgcccgggctcagcggccttgagttgttggccgaggtacagcgtcgcgatgccgacctgccagtgattttgctcaccggccatggcgacgtgccaatggccgtcgaagccatgcgcgacggggcttacgacttcctggaaaaacccttcagccccgacgccttgctcaacagcctgcgccgggcgctggacaagcgcggcctgatcctggaaaaccgccgcctgcatcaacaggccgatcatcgtgcgcagttggagtccagcctgctgggcgtgtccaagggactgcaaagtttgcgccgccaagtgctggacctggcgagtttgccggtcaatgtgctgattcgtggcgagaccggcagcggtaaggagctggtcgcccgctgcctgcatgacttcggcccacgcgccaagaagcccttcgtggccctcaattgcgcggcgatccccgagcagttgttcgaagcggagctgttcgggcatgaaagcggcgccttcaccggcgcccagggcaaacgtatcggcaagctggaatatgcccacggcggcaccttgttcctggatgaaatcgaaagcatgcccctggcccaacaagtgaaattgctgcgtgtgttgcaagagcagaagctggagcggctgggctccaaccagagtatccaggtggacctgcgcatcatcgccgccaccaagcccgacctgctggaagaggcccgtgccgggcgttttcgcgaagacctggcctatcggctcaacgtcgcgcaactgcgcctgccgccattgcgtgaacgtcgcgaagatattccgctgttgtacgagcattttgcgcaaagcgccgccgagcgtctgggccgccaggtcgagcccttgagtgggccacagctggggcgcctgctcagccatgactggccgggcaatgtgcgcgaactggccaacgtcgccgagcgtcaggtgttggggctggacgagccggaaccgcaagggatcgaagccgggcaatcgttggcggcgcagcaggaggcgttcgaggcacactgcctgaaggccgctttgacgcgtcacaagggtgatatcaaggcggtgctggccgagctgcaactgccgcgccgtaccttcaatgagaagatgcagcggcatgggttggtaagggagatgtttgtgtagcgacctttggatcgccatcgcgggcaagcccgctcccacattttggtctgtgaacacagcaggtgtgggagctggcttgcctgcgatggcgtcggcagccataagcggatttccgctcattaccccaaaaccatcagcgactttccgctcaaaaaaatcccgcaacccttctattccgggccttcctctacctggcacagctcctgctatagccccaacaggctgcgcacgcgccgctccataaaaacaactagatgaaggatccttcaatggataactccaacaccgtgcctctgggatcgacggccgcaaaagcgcaggagcgcaccacctccagccgcatcaaatcgattttcagcggatcagtcggcaacatggtcgaatggtacgactggtacgtctacgccgccttctcgctgtattttgccaaagccttcttccccaagggcgacaccactgcccaactgctcaacaccgccgcgattttcgccgtgggcttcctgatgcgcccgatcggtggctggctgatgggcctgtacgccgacaaagtcgggcgtaaaaaagccttgatggcctcggtgtacctgatgtgcttcggctcgctgctgattgccctgagcccaggctatgaagtcattggtatcggtgcgccgatcctgctggtgtttgcccgcctgctgcagggcctgtcggtcggcggcgaatacggcacctctgccacttacctgagtgagatggccaccaaggaacgtcgcggcttctactccagcttccagtacgtgaccctgatctctggccagctcatcgcgctggcggtgctgatcgtgctgcaacaggtgctcaccaccgagcagttgtacgcctggggctggcgtatcccgttcgccatcggtgccttgtgtgcagtggtcgcgctgtacctgcgtcgtggcatggaagaaaccgagtcgttcaccaagaaagaaaaagccaaggaaagcgccatgcgcaccttgatgcgccaccccaaggaactgatgaccgtggtcggcctgaccatgggcggcaccctggcgttctacacctacaccacctacatgcagaaatacctggtgaacacggtcggcatgagcatctccgactccaccaccatctcggcggcgacgctgtttctgttcatgtgcctgcaaccgatcatcggcgggctgtcggataaagtcggccgccgcccgatcctgatcgccttcggcgtgcttggcaccctgttcaccgtgccaatcctcaccaccctgcacaccatccagagttggtggggcgcgttcttcctgatcatggcggcgctgatcatcgtcagcggctacacctcgatcaacgccgtggtgaaggccgagctgttcccgaccgaaatccgcgccctgggcgtgggcctgccgtatgccttgaccgtgtcgatcttcggcggtaccgctgaatacatcgcgctgtggttcaagagcatcggtatggaaactggctactactggtacgtgaccgcgtgtatcgcggtgtcgttgatggtttacgtgaccatgaaggacacgcgtaaacactcgcgcatcaccaccgactaaaaaatgtgggagcgggcttgcccgcgatagcggaggatcagtcaaagttgtatcaactgacccaccgccttcgcgagcaagcccgctcccacatttagtcttaggacaactctgcggcctcattgcgcccatagcgccgctgcgcatacgacgcgccagcaatcatcaccaccagcaccgcagccaataccgcggatgaaccgatggtgccgaaatccaagccgcctttttcatggggtttggtcagaaaatcccccaaggtcgcgccaaacggccgtgtcagtacaaacgccacccagaacaacagtaccgacgagatgcgggtgaagtacttgagtaccaccaccgcggcgatggtcgagccgatcaacaatgcgccaccggcgaagcccagccccgaatcgtccgcgaggaaatcgcccaatgcggtgcccaaggtgttggagaacaggatcgccatccagtaaaacagctctcctcggaaggtctgcaccttgttcacgttcagcgagtcaccactgaggtgccacaatgcaaagatgatcatcaggatcacgatcaggatcatcgacccggtggcgtagcccagccccagcgtgcggtccatgaagtcggacatcgtggtacccgcagtactggtagacaaaatcacgatccagtacagcaccgggttgtaggttttcgaccagagttgcgtcaccagggtcaccaggaacacgctgatgaggatcatggagctgatggcgtagccaacgttcaaggtcatcgacagcaagtccccggcggtttcgcccaaggtggttgcgcagattttcatgacccagaacgccagggtaatctgaggaagtttgttcatgcagtagatagctccaaggctcagtcttatagggggtattgaccttgggcgcagactgaagggaaagctgtgaaaaataggtgggcgatgtatgaaaaatccatcggtacgatggaaattcaccgccatgaattgcactatgaccgcctcccaaaccgcgtagcaggaaccccggccatgcctgacgacatccactattacgaacccgccaacggccacggcctgccccatgacccgttcaatgccatcgtcggcccacgcccgattggctggatctcctcgcacgatcgcgaaggccgcctgaacctggcgccctacagcttcttcaatgcgttcaactacattccgccgatcattgggttttccagtgtcgggcgtaaagacagcctgaacaatatcgaacagactggagaattcgtctggaacctggccacccgcccgctggccgagcagatgaaccagagctgcgcggccgtatcgcccgaggtgaatgaattcgaactctccgggctgacgccggtggcttcgaaaatcgttggcgtaccacgggtgggcgagagcccggtgtcgttcgagtgcaaggtgacgcagatcatccaactgcaacgtgccgaccaacagttggtgccaagctggctggtgctgggcgaggtggttgcggtgcacatcgccaaatggttgctcaaggatgggatctacgacactgctgccgccgagccgattttgcgcgggggtggcccggcggattatttccagctggggccgcaagcactgttcaagatgtaccgcccaggcgcgacaaaaccctgactgcaatgcaatcaaaactgtgggagctggcttgcctgcgataatagcggtgggtcagttaacccaagagtgactgatacaccgctatcgcaggcaagccagctcccacattggttaggtgtgctgcctcagcgttcagcagtcgcccaggtcagttggccttctgcatccacatcgaccagatgctcaagttgcagcgtcgccgcatcatcggcatccgaagccgtcttgaacgtctgcccatcaaggatcttgtgaaacttgggtgcgcccatgccatccagtgccttgacggcgacggcggcgctgtagccaccttcgcccggtactacggcggaaacggcttcgtggtgggcaaattgtttacgtgccatgttgcaggtcctggccaatggaaagtcggccattctaaccgttaaccggccagttgcaggtactcgccgtaggcctgtgccgccgatgcgtcggtgaaggtctggaagtccatgctacgcacgaccatgtcgttcagcagctcggtgaagatcatcagggccggagagttgaagtaggcgctcatggcctgctcgctgctccagaacccggacaccagccacacatcggggtcgacctgggagtgctgcaacgagaattgcaggcaaccctgggcctggcgacctggttcgatcaaactgctcaagcgtgcaccgagttcggtgctgcacccgctacgggcgcggataaaggccatatggctcgcgggaatgggggtggacatgttcgactctcccgttgagaagtgatgctcggcaagcacaatgagggcgtgttgccacaggatcaaagataacggcgcgggcgtgggcgcggttagtcgattcctgcaggcttcttgcacaatcctgcgagaagcgtagggaggacgttcggccccaggatttattccaggcccaggcctcatgtttcaggctgatgacaggctgcgcacttgcctgattcacgctatctcgcaggatcaggcaaggatcctgcagaatcgacgtaacactttctgaaaagccgccgctaagctgagcccatcaaagccgcgtgtagaggacgccccatgccgtcgcccgaatccaagcccgttcccctcgatgccgagatggagaaacaacgcgccgagctcgccagtatcgtgcaccgccatacctgggaggacggctcctacggcacggcgattacctcgctgtacctgaaccgccacaatgcgccccgggatttcatgccggtgctggtggaacccgcgctgtgcatcctcgccagtggcagcaaggaagtgcgcctggccgacgagatctttgcctacgacccgctcaactacctggtgttctcggtggcaatgccggtggccggccgcatcattgacgccaccgccgaggacccgaacctctcggtgcgcatcaacatcgacccggcgcagctcaccgcgctcatcgcagaggccgggccaatgggcgtgccctcacgcccgacctcgcgaggcatgtacgtcgaccgcatcgatcacgcactgctcgatgcggtgctgcgcctgacccgcttgctggacacgcctaaagacatcgcgatgctcgcgccgctgatcaaccgtgaaatcctctaccgtttgctgcgtggcccgcagggttatcgcctgtatgaaattgctgtggctaacagccagagccatcgggtgagccaggcaatcacctggttgaatggcaactacgaacagccgctgcgtatcgacgacctggccaaggaagtgaacctgagcgtctcgaccttgcaccaccggttcaaagcgatcaccgctatgagcccgctgcaataccagaagcaactgcgcttgcaggaagcgcggcggctgatgatcgccgaagggctggaggcttcggcggcggggtatcgggtggggtatgaaagcccgtcgcagttcagccgggagtacagccggttgtttggtgcgccgccgctgcgcgacctggcccggttgcgtcaaagcatctgatgtacgcggagtaaaatgtgggagctggcttgcctgcgatggcggtgtgtcagtcactgatgagtcaactgaaccactgctatcgcaggcaagccagctcccacagtagtcctgcgtatattcagtctaatccgcgggggagttgcagggtgacacgcaggccgccttcgcgcaggttctgcaaactcacttcgcccccatggctgtgggcaatgttgcgcgcaatccccaaccccaacccgtaaccctgctgctggccggccaggcgaaagtgcggttcaaacacttgctccagtcgctgctgcggcacaccaggcccttcgtcgtccacatgcaggatgaactgcacgccatcgtcctcgatatgcaaatgcgcgttctgcccgtacttgagcgcgttgtcgatcaggttgccgatgcaacgcttgagcgccagcggcttgcctgggtaggctgacagcgccgtgccatcgagggtcactcggccattgccatggggtgccaggtacggctccaccaggcattcgaggacgtggttgaggtccaccggctggatgttttcgtggatgtcggtgtctttcacacattgcagcgcgcccttgaccagcaattccagctcatccaggtcacggccgaatttgttttgcaggttctcgtcttccagcaattccacgcgcaggcgcaggcgggtgatgggtgtgcgcaggtcatgggaaatcgcgctgaacaactggctgcgctcggtcaggtaacggctgatacgttcacgcatggcattgaatgcacggcccacttccaccacttcactaccgccgccttccgccaccggctccacatcggcgcccagggacatgtcccgcgccgctcgcgccaggcgcttgagcggccggctttgccagtgcaccagcaggccgatgaacagcagcagaaaaccgctggtgagcacgataaaccacacctgctgggacggcaggccttgctcttccaggctggtgtagggctcgggcaacagcgaggcgatgtacagccattcaccgggcgccagttggatctgggtgaccagcaccggcgggttcaccggttccagggtcagcgcgtaatgggcccaggaacgtggcagttcgtcgagcttcaggccagcattgaagatgcgcaggtcttcggcgctgacgaactcaaccgagatgtgcacgtcggcacccagggtctggcgcagcacttcatccaccgccaccagtaccgcttgcttgcgcggggtttcgggcagtatttgcatgtccagcgggcgatcattgagggtcaccacaaaacgcgtgccgcccatgctgcgcaattggtccagcaccaacgggcgataggccaccggcagcgaccggaagtaactcacgctggcggtcattgaatgcgccaggctgcgggcgctggtgaccaggccctcaagctgggtggcgcgcagttgcgacacccagatcacgctggacagcgcttgggcgaacagcaccgccagcaaggtcaggagtaacatgcgccccagcagcgagcggggtaccgggaagcggcggcgacgttcgttcagcggttcagtgggcattgccggcaaccacgctggctgccagttgatagccgctgccacgcacggtgcggatcagccgcggaggtttctcggtgtcgcgcaggcgctggcgcaagcggctgacggccatgtcgacgatacggtccaagggcatgaggtcgcggccacgggtggcgttgccgatggtgtcgcggtcgaggatctgttgcgggtggtcgagaaacaacttgagcaaggcgaaatcggcaccggagagaattacctcttcaccatccacatgaaacaagcggtggctgatcatatccaggcgccattcatcgaacacccacacatcaccgccgctgctgcgctcctggccgaattggcagcggcgcagcagtgccttgatacgcgcctgcaactcgcgggggctgaacggcttgccgatatagtcatcggcgcccagctccaggccgatcacgcggtcggcttcgtcggaactggcggtgagcatgatgatcggcacctgcgcctggcgcgggtgctggcggatccagcggcacaggctgaagccgtcttcgtccggcaacatgacatcaaggatgaccaggtcgcacggcgcctcgttcatcgcctgacggaaccccgcgccatcggacacgccacggacctggaagccggcgcgactgaggtaggtttgcagcaattcgcggatttcctggtcgtcgtcgacgaggagaatggatttactgattacgctcacgggggcctccttgttgttatggcctggcttaaatcatcgggtgccctttaggccgtcatcgcaggcaagccagctcccacacttggaatgcattccagactgtgggagctggcttgcctgcgatggcgccattatgacctatgcaaaagcttgctcaagcgccacacccgccccggtcaagccggaatacggcgccgtcaccagccacactggaatacccttgaagtagtcgctcatgcagcctttatccgcaaagcttttagcgaaaccactggtgataaagaagtcggcaaacctcggtatcaccccgcccacgatatacacgccaccgcgcccaccggtggtcaatacgttattgcccgccacccggcccagccagatgctgaactggtccaatacttccatggccaccggatcgccggccaggcccgccgccgtgatggcttcgggggtgtccagcacaggctcatgcccatccaccgcacaaatagcccggtacagccgcggcaagccgccgccgctcaacgcggtttcggcgctgacgtgcccgatctcgctgtagatgtgttgccacagctgggtttcccgtgggctgctcaggggcaggtcgacatgcccaccctcccccggcaatgctgcccagcggcctgcgccgaggtccagcaaggtgccgacgccaagaccggtgcccgggccgatcaccacggccgggcgcaagggctctggcgtgccttcgcagaccacgcgaaattcgtcgggcttgagccgggtcatgcccaaggccatagccgagaaatcgttgaccagcaacagctcatccacctgcagggcctgacaaaacgcggttttgctcaggcgccagtggttgttggtgaacttgaattcatcgccgctcaccggcccggccaccgacaggcacaccgcaccgatgtcaccgatttgcaggccttcttctttgaggtagagcttgatcgcctcttcagggctgccgtgatccgccgtggcatgcacgcggatcgaatgcagttcctgatcccgccataacgcaaaacgggcgttagtccccccgatgtcaccgaccagcgcaagcttcacttaagcgtctccaaggcagaggtaaaggcgctggcgccctgctctgcggagcttgcggccaagcgcatgaatgcaaacagctcgcgaccggcccccacgttattgcccaacaggcccgtggcaggcgtgcgcgctgcaaatacttcggcgtccaccttaagctccagggtgccggtaacgccatccacacggatgatatcgccatcctggacccgcgccagcggcccgccgctctgggcttcgggattgacgtggatcgcggcagggatcttacccgacgcgccggacattcgcccgtctgtcaccagcgccactttgaaaccacggtcctgcaacacgcccaggaacggggtcatcttgtgcaattcgggcataccattggagcgcggcccctggaagcgcatcaccgcgacgaagtctttttccaacaagccggccttgaaggcatcggcgaggtcctgctggtcctggaacaccaccgccggcgcttcgacaacctgatgctccggggctaccgccgaaaccttcatcacgccacggccgaggttgccttccatcacgcgcaagccgccttccggcgagaacgcacgggccaccgggcgcaggatggtttcgtcgaggctttcgatcgggccgtcacgccagaccagttcgccatccaccaggaaaggttcctggatatagcggctcaagcccttgccggccacggtgttgacgtcttcgtggagcaggccggcttccagcagttcgcggatcaggaacgacataccgcccgccgcctggaagtggttgatgtcagccttgccgtttggatacacgtgggacagggttggtaccacctcggagaggtcggccatgtcctgccaggtcaggatgatgcctgccgacatggcgatggccggcatgtgcagggtgtggttggtggagccgccggtggcgttgagcgcaacgatagagttgacgatggacttctcgtcgacaatctcgccaatgggcgtgaagttgccattggccttggtcaagcgcgtgacctggtgcgcggcttcgcgggtcaacgcatcgcgcagtggcgtgtacgggttgacgaacgaagcgccgggcaagtgcaggcccatgacttccatcagcaactggttggtgttggcggtgccgtagaacgtgcaggtgccggggctgtggtaggacttcatctccgattccagcagttcttcgcggctggccttgccttcggcgtagcgctgacgcacatcagccttctgcttgttggagatacccgacggcatcggcccgcccggcacgaagatcatcggcaggtggccgtagcgcagcgcacccatcatcaggccagggacaatcttgtcgcagatgcccagcatcagcgcggcgtcgaacatgttgtgggacagcgctaccgccgtagacatggcgatgacttcacggctgagcaggctcagctccatgcccggctcgccctgggtcacgccgtcgcacatggccggggtgccgccggcgaactggccgaccgagccgacttcgcgcagggcctttttgatttgttcggggaaatgctcgtagggctgatgcgccgagagcatgtcgttataagaagaaacaattgccacgttggcggcattcatcatgcgcaggctgtttttgtcttcggtgccgcaaccggccacgccgtgggcgaagttggcgcactgcagcttgccgcgcatcggaccgtcgctggctgcgccgcgaatgagcgcaaggtaagcctcgcgggtggcgcggctgcgggcgataagccgttcggtgacctcaagaacgcggggatgcatgtatagaactccaggctaacggatgtggcgacctgagagtctatgctgatcaaacgcccacggctcatgggatggcagggggtcgtttggatcatcggaccagttgattcaggtcactcgttgtagattgaacaaaatattgccactaaaaaggcttgttttctatttttatgcgaataatcttgtaattcttacaacaaatcgacgacaggcactttccgatgactcttcgaatcgcaatcaatggttttggccgtatcggccgtaatgtcctgcgcgcactgtatacccaaggctatcgccaggatctgcagatcgtcgccatcaacgatttgggcgacagctcgatcaatgcccacctgctcaagtacgacaccgtacacggcactttcgacgcagaggtcgcccacgatcaggaaagcctgaccgtcaatggtgaccggattgccgtgagtgccattcgcaaccccgccgacctgccgtgggctgcgcacaagatcgacgtggtgttcgaatgcaccggtctgttcaccgaccgtgacaaggctgccgcgcatattagcgctggcgcgcgcaaggtgatcatttcggccccggccaaaggcgctgacgccactgtggtttacggcgtaaaccatgacattttgcgtcaatcccaccagatcatttccaacgcatcgtgcaccaccaactgcctggcgccggtggcccaggtgctgcaccgcgagctgggtatcgaaagcggcctgatgaccaccattcacgcctacaccaacgaccagaacctcaccgacgtctaccacaccgacccgtaccgcgcgcgttcggccacccagaacatgatcccgagcaagaccggcgccgctgaagcggtgggcctggtgctgccggaactggcaggcaagctgaccggcatggcggtgcgtgtaccggtgatcaacgtgtcgctggtggacctcaccgtgcagttgaagaaagaagccacggccgatgaagtcaacgccctgctcaaacacgccagccagcattcgaagatcctcggctacaacaccctgccgttggtttccagcgacttcaaccataacccgctgtcgtcgatcttcgacgctaatcacaccaaggtcagcggcaaattgctcaaagtgctcgcgtggtatgacaacgagtggggcttctccaaccgtatgctggataactgcctggcgttgtgtaacgccgagtaactccacaggatcgaccagatcgttcccacgctctgcgtgggaatgccaccctggacgctccgttgtgacgcggagcgtcacaggatgtgttcccacgcagagcatgggaacgagcggcaatccacagaaatagccacttgccatttcagttgatgataagcattatcattcactgcaaatcggtctggtatcactgtgagccaatctcgcttcaaccacgtcttcctcacccaacgggtgatcctgctacgaaccctgcaacgcatggtgcacaaccacagcactgccgaggacctgttgcaggaaacctacctgcgcgtgactcgggccctgagcgagcggccaatcgaccaccttgaaccttttgtctaccagacagcccgcaacttggcgctggatcacttgcgctcgcgcagaattcaggcgcgcaccctgcaggaggatgtcccgctggatgtcctgcaaagtgtcgcagcgcccgctagcacgccggaggaagccacccaggccgagcaactgctggagcacttgagtgtcagcctcggccagttgagcgcccgccagcagcggattttcatcctcagccgcttgcacggttgcagctatcaggagattgccgatcagttgggtgtgtccttgagcacagtgcaaaaggaactcaaattgatcatggctatctgtgtgggtgtggccgaacggctggatcagccttaagcttcacccgacagaggtgtcgatccaagctgtaggaaaaatgaatagaacgtggcgaagacccgaggaacaccgtgacggacccgaataaactgcgcccccatgcgttggctcatgaggtgttgcaagacgcggccatggaccaagccctcgattggctgatcgccttgcagtgcccgcaacctgggcagcaggccgcgttcgacgcctggctggcccaggacccggcgcatgtccacgctttcagcaaggcccaggccgcctggggtgacgcaccggtgcacagcgccgccgtggccctcgccgcaccgcgcaagcccagcggctggcgccggatcaaaccgcactggaaacccctggccaccgccgccgtgttactggtcggcttgttcagtttcagcaacctgccggtgcgtttgcaggccgaccatctgacggtggtgggcgagcgccagcgcctgcagctggatgatggctccaaggtgctgctgaacaccaactcggcattttccagcaccatcaaggaccaccagcgcattgcccgcctgtaccagggcgaagcgttcttcgaaatagcgccctcccgtggcctgcccctggagatcgacgccggcccggtgcgcgccagcgtgcgtgataccgcctttgccgtgcgctacctcaatggcgaagcccaggttcaagtgcagcgcggcgatgtcgacctgagcaatactttcgacgatgcccgtgtgcgcctgagcgccggtgaaagcatccgcatcggccccaagggtttcggccaaccggccaagctcgatgccagcaaagacctggcctgggtccagggccgtctggtgttcgaaaactgcccgctgagcgaagtgctggctgagctgcgccgctattaccccggctggatcgtcaacaacaacgagcagttggccagcgtcgccgtcaccggcaactaccgcctggaccaacccctggacgtggtgcgctccctggctcacatcacctcggccaagctgtcggagtacccggcgctggtgatcctgaactaaatgagaattatttttactcgatgttaaccggcgatacgtctcgttatagccaatgcaactgattcctatttggttcggttcgcaactataagattcgtctcccggagcgctctcgatgtcctctcgtttcaaccgccggtctgcttcgcccgttttgtccttgctgaccgccgcgatcctgctggctggcgcgcccgtcatgagcgccagcgccgccgaacctgccgctcgcagccacgccaattacaccttcagcattgaacagcagccactggtgtcggcgcttaacgccttcaccgcagtgaccggctggcaagtcggcctgccggccgaactgggccagggcgtttcgtccccgggcgtgcgtggcccgctaccagcggaaaaagccctggagcggctgttggtggggaccaacctgagctatcgcaaactgggcaccaacaacatcgtgctggaaaaacgtagcgccggcagcgccctcgccctgcaacaggtgaccatcagcgccacccgtaacgaacaggatgtgaacagcgtaccgagcaccgtcagcgtgcacgaccgccaggaactggaccgccagaacgtcaacaacatccgtgaactggtgcgctacgaacccggcgtctccgtcggcggcgctggtagccgctcgggtaacgcgggctacaacattcgaggcatcgatggcgaccgcgtgctcactcaggtggatggcgtcgaagtgcccgacaatttcttcaacggcccctacgccaagacccgccgcaattacgtcgaccccgaaatcgtcaagcgcgtggagatcctgcgcggcccggcctcggccctgtatggcagcagcgccatcggcggcgcggtgagttatttcaccctcgacccggacgacatcatcaagccaggccaggacgtcggcgcccgcctgaagaccggctacagctccgccgacgagagctggctgacctccggcaccttcgccgggcgtgtgcaggacttcgacggtttgctgcacctgagccagcgcaatggccatgaaaccgagtcctacgatggcaacaacgccaccggcctggcccgtaccggcgccaacccggaagatgcgcgcaccaccaacgtgctggccaagctgggctggaactatggcgatgacaaccgcctgggcctgacctatgagaagttcaaggatgatcgcgacgtcaatctgaaaaacgcagtgggcggcccgttcatcggtggccggggcatgaacctgtaccgcgaccgtcgcggtaacgacaccatcacccgcgagcgcttcggcctggaaaacaccttcgccctggagtcgccgattgccgaccgcatcaagaccagcctcaactaccagatcgccaagaccgaccagaccacggcggaaatctaccaggccggccgtcgcgtgctgcgcacccgcgacacgctttacgaagaaaaacagtgggtcttcgacgctcagttagacaaggctttcagcctgggtgaaaccgagcaccaggtgacctacggcaccaccctcaagcagcagaaagtcaccggttcccgcgaaggctcggcctcgtgcctggccattggcgccggctgcaccgccattggcgggccaagcccatcagccggcgacagcgtgaagaaggccagcgacttccccgacccgaccatcaacacctactcgctgttcgcccaggaccagatcacttgggacaaatggaccttcctgcccgccgtgcgttatgactacacccggctcaagcccaagctgacccaagagttcctcaacaccgtcaacccgaccggtgcctatgccgtcgatggcaaagacaagacctggaaccgcgtaacacccaagttcggcctcacctatgccctgaccgacaactacacctggttcggccagtacgccgagggcttccgcacgccgtccgccaaggccctgtacggtcgcttcgaaaacctgaacctgggctacaccgtcgaacccaaccccgacctcaagccagaaaccagcaaaggcatcgaaaccgggattcgcggcaaattcgacgaaggctccttcgatattgcggtgtactacaacaagtaccgtgactttatcgacgaagacaacgccgtggtcggcggcaccgtggagcagttccaggcggtcaacatcaagcgcgccaccatcaagggcgtggaagccaagggccgcctgaacctggataccttcggcgcgccgaagggcctgtatacccagggctcggttgcctacgcccacggtcgcaatgacgacaatggcgagccgttgaacagcgtcaacccgctcaagggcgtgtttggcctgggctacgaccaggacacttacggtggcctgctgagctggaccttggtgaaaaaacagaaccgcgtcgacagcacgaccttccacgcgcccgacggcggcaccgacggcccgttcaagaccccgggcttcggcatcctcgacctgaccgcttactacaaggtgagcaaagacgtgaccgtcaacggtggcctctacaacctcaccgacaagaagtactggaactgggatgacgtgcgcagctacgacagcgtcggcgaagccggtgtcaccggcccggctaacctcgaccgcctgacccagcccggtcgcaacttcgcgatcaacgtgatctgggacatctgacccatgcgccccacctcgccgcccatgcatctgcggcgaggtgaggattttttactgtgccgcgtcttcttgttcgtctagttgataacagctctctttaagggcacccaggcgcttctcttctcaaggacttttttcatgaccgcttcttccaccgcagaacgcccaagcctgcgctcccaacgcctgaaccaaatcaccaacgagccgcacaccaagctcgacgcattggtgaaggctcacgcgccgttcgaaacccaggccaacttcgcccgcttcgtcgtggcccaatacctgttccaatcggaactggtagccctgtacaacgatgccgagctgaaccagatcatccctgacctggccgcccgctgccgcgccgaagcggccaagctcgacctggcagacctggacaccgaaatcccggccccggttgccggcgcggtgaacaaccccagcaaagccgaagccctgggctggctgttcgtctccgaaggttccaagctgggtgctgcgttcctgatcaagcgcgccgtgggcctgggcctgagtgaaaccttcggtgcgcgccacttgggcgagccggccggcggtcgcgccgagggctggaagagcttcacccgcaccctcgacggcctggcattcagcgccgaggaggaagctgcggtggaaaaaggcgcgattgatgcgtttgtgcgcttcaccgtgctgctggaacaggcgtacgctagcgccccagaactggcgtaagtgttccggtacacggcggttcaaggtgggagctggcttgcctgcgatggcggcgggtcagctccagatgtttaacctgatgcaccgctatcgcaggcaagccagctcccacatttgagtgcgtttcatcgctgacaatgtgtaaaccctcccaccagaaaactgcagcatgaccggcaaaccccaatcctcctccaaaatcgcccaaatcctcttcggcctgctggcctacgtgagcctgggcatcggcttggtggcgattgtcataccggggttgcccaccaccgaattcatcctgctcgccgcctgggccgccaccaaaagctcgccgcgcctcagcgcctggctggaaaaccaccgcctgttcgggccgatcctgtccaactggcgcaatggcaagatcatcgcccgtcgcgccaaggtcagcgccacggtgagcatgttgctgtgtgccgcgttgatgctggtgatgctcgatcacggctggccggtatacctggcgattgccgggatgagcctgggcaacctgtggatctggtcccgccccgaacagctggcacgtcccgtctaaggcggcctgtaggcgttttcctaccgctcatcgcctcttcctcatgaattgatttgtgacgccgatgtttcaggcatgacgccgaagggacttggcgcgtttgcgtgcattccaacaagtccattcgtgagtgaacctatgttcgacaccctctccatccgcttgaaaatcgtgttgctgtccggcctgtgtctgctgggtgtgattgcactggtggtcggcatcaatatctacaacaccaaccagaacgatcggttggtcagtgattcaagctcacgaatgctcaccgccagcgtggagcaattgctgcaatccaaagcggccgaacaggccggccacttacagcagaccttcggcgaaaacctgctggtaatcaccgcccttgccgaccagatcaaagacctgcgtcagttgggcacccagcgttccctggaagccggtgccctgcgtgaagaactcaaccgcagcgtcaaaaccgcgttcgagcgcaacaccaaggtgctaggcatctggttgtcgttcgaacccaacgggctggatggcaaggacagcgaattcatcgacgacaaggcgcgcgtttccaatgaaaaaggtcggttttccagctactggagccgggctggcggcgaaggccagaacaccatcatggtcgaagatgacctgaccaagaccaccctcaaccttagcggtacgccctacaacatctggtacacctgcccacgggacacgcgcagcacttgcctgctggacccgtacgaagacacagtggccggcaaaccggtactgatgaccaccatttctcttccgctgatcgtcgacggcaaagtcatcggcgtcgtcggtgtggacattgccctgaccgccctgcaagcgaccaccgatgcggcgcaaaaagacctgttcaacggtgccgcccacctggagattctgtccagcaccggcctgatcgccgcctacagcggtgaaccggccaaagtcggcaagaacctgatcgacagcatcggcgccgaaggcaaggagatcgtgcaactgctggccaatgaccgtcctgttatccgtgagcaggacgacaccattcgtgccgtatatccgctcaagccgattgccggtgccaaatcctggggtgtggtgatcaagctgcccaaagcggtgatgctggccgacaacgaaaaactccaagccgtactcgacgaggcccaggcaacgggcacgctcaaagccctgctggtggccgccgccgccggcctgctgggcttgctgctgatctggctgaccgctactggcgtgacccgccctatcaatagcgtggccgccatgctcaaggacatcgccagcggtgacggcgacctcacccagcgcctggcctacgccaagaaggacgaattgggcgagctggtgaactggttcaatcgtttcctcgacaagctgcagccgaccattgcgcagatcaagcaaagcatcaccgaagcccgtggaacggccgatcaatcgtccgccattgcgcgccagaccagcgaaggcatgcaggtgcagttccgtgaaatcgaccaggtcgccaccgcgtcgaacgaaatgagcgccaccgcccacgacgtggccaacagcgcctccaatgccgccagcgcggcacgcggcgccgaccagtcggcacgcgaaggcatgtcgatcatcgagcagagcacccgcgatatcaccactctggccgacgaagtcagcaaagccgtgggcgaagtcgaagccctggcggtcaacagcgagcaaatcggttcagtgttggaggtgatccgcagcattgccgaacagaccaacctgctggcattgaacgccgcgattgaagcggcacgcgccggggaaagcgggcgtggttttgcggtggtggccgacgaagtgcgcaacctggccaagcgcacccaggactcggtagaagaaatccgcctggtgatcgagcgtatccagagcggcacccgtggcgtagtggcgaccatgcactccagccaacaccaggcgcagagcaatgccgggcagatccatcaagccgtgcaagccctgggcaagatcagcgacgcggtcacggtgatcagcgacatgaacctgcaaatcgccagcgctgccgaacagcagagcgcggtggccgaagaggtcaaccgcaacgtctcggcgattcgcaccgtgactgaaaccctcacgggtcaggccaccgagtcggcggcgatcagcagccagctcaatgcgctggccagccagcagatgaagttgatggatcagttcagggtctgattcggttctgaaaacattgcctcctgtaggagcgagcttgctcgcgaaaaacgtcaacgataacgcgtgcttcctgannnnnnnnnnnnnnnnnnnnnnnnnnnnnnnnnnnnnnnnctgaataaacgcggcgcctgtgagtttttcgcgagcaagctcgctcctacatatagagcaggatggtggtgaattacaggccgggccaggcctggacgaacggcgtcaggtcttccttcggcgccgtacgcggcgggttctgcggtgtgcccaggtagagaaagccaatcacttcttcattcgccgccagccccaggcctttggcgacatgagccgagtaggacaattcgccggtacgccacaccgcaccaatgccctgggcatacgccgccagcagaatgccgtgggccgcacaggcggcggccagcaattgctcggacttgggcactttgaaatgctcttgcaagcgtgcaatcaccaccaccaccagcggcgcacgcagcgggccgttctgggccttgtcgatggcggcttgcggtgcgtcggcatcctgcaggcgagccgcttcggccaacagcgtgcccatctgttcacgcgctgcaccttccacggtaaggaaacgccacgggcgcagttggccgtgatcgggcgcgcgcatggcggcggcgaacagcaggtcgcgctgctcctgggtcggtgccgggtcgagcaaacggggcacggaaacacggttgagcaaagcgtcgagagcctgcattggccacctccataaaaaaatgtgcggtcattctaacgggaaagaatcgggatgccaccaaacgataattgctcttattcaatctgccctgccctgttagactttgcgccttaattttctgccctcgtccaggaatcttgatgttccgtgcgcttttatacctgccagcagcgttgatggctttaagcctgactgcgtgcgatgacgcccctcgcttcacaaaagcagagccgggtgaatcgcgggccggtggcgcggcgacggtaaacaagcgcgaccagaacgccttttccctgccctcggccaacctggcgcccacgcggcgcctggacttcagcgtcggcaacagcttctttcgcaacccgtgggtgattgcgccgtccaccaccacggcgcgcgatggcctgggcccactgttcaataccaacgcctgccagaactgccatatcaaggatggccgtggccacccgccgctgcctgacgcgcccaatgccgtgtcgatgctggtgcgcctgtccatcccggatgctcagccttacgctaagctcatcgaacagatcggcgtggtgcccgagccggtctacggcgggcaactccaggacatggccgtgcccggcgtcgcgccggaaggcaaggtgcgggttgactacacaccggtcaacgtcaggttcaaggacggtacggtggttgaattgcgcaagcccgacctgcagatcacccaactcggctacggcccgatgcaccccgacacacgcttctcggcgcgtatcgccccgccgatgatcggcctgggcctgctcgaagcgatcagcgatgccgatatcctgcgcaacactaaccccaagaccgccgacaaagaggccatcgtgggccgcgtcaattgggtctgggatgacgcccagaacaaaactgtcctcgggcgttttggctggaaagccgggcagcccaacctcaatcaacaaaacgttcacgcgttttcgggtgatatgggcctcaccacgtccctgagacccttcgatgactgcaccgacgcccaagtggcctgcaaacaggcgcccaacggcaatggccccgagggtgagccggaagtcagcgataacatcctgcgcctggtgctgttctacacccgcaacctcgcagtgcccgcacgtcgggacgttgatacgccgcaagtgctggccggcaagaacctgttctaccaggccggttgccagggctgtcacaaacctacgttcaccacggccgccaacgccgccgaacctgaactggccaaccaggtgattcgcccttacagcgacctgctgctgcacgatatgggcgaaggcctggccgacaaccgtagcgaattcaaagccactggccgcgactggcgcaccccgccgctgtggggcattggcctgacgcaaaccgtgagtggccacacccagttcctgcatgacggccgcgcccgcaacctgcttgaagccgtgctgtggcatggcggcgaagcccaagcggcgcagcaacatgtgttgtcgttcaatgccgagcagcgtgccgcgttgctggcgttcctgaattctttataagctttgccccacttacagaagggagctcgacatgtttcgtcccaagttgttgttcaccagcctcgccgccctggccttgggcgcctgctcgccccaagacccgcaagccgtgacctcggcggccatcgccaagcaagtgatcctgccaacctacagccgctgggttgaggccgaccgtcagttggccgtcagcgccctggcttactgccaaggcaaggaaagcctggacaccgcccgcgccgacttcctgcacgcgcaaaaagcctgggccgagctgcaaccgctgctgatcggcccgctggccgaaggcaaccgggcgtggcaggtgcagttctggccagacaagaagaacctggtcggccgtcaggtcgagcaactggtcagcgcccagccgcagatcgacgccgcggccctggcgaaatccagcgtggtggtacagggcctgtcggcgtacgaatacatcctttacgacgccaagcctgacgtcgccgacgacgcccagaaagcgcgctattgcccgctgctgatggcgatcggtgaacgccagaaagtcctggccgaagagatcctggccagttggaacagcaccgacggcatgctcgcgcagatgaccaagtttccgaaccagcgctacgctgattcccacgaagccatcgccgacctgctgcgcgtgcaagtgaccgccctggacaccctgaagaaaaaactcggcaccccgatgggccgccagaccaagggcatcccgcaaccgttccaggccgatgcctggcgcagccagtcgtccctgcaaagcctggaagccagcctcgccgcggctcagaccgtgtgggtgggcgtcgataacaaaggcctgcgtggcctgctgccggcggaccagaagccactggccgagaaaatcgacgccgcctacgcagcgtccctgaaactgttcgccagcaaccagcgcaccctcaacgaactgttgaatgacgacgccgggcgccagcaactcaacgacatctacgacagcctcaacgtggtccaccgcctgcatgaaggtgaactggccaaggcgctgggcgtacaactgggctttaacgccaacgacggtgactgatgatgctcaggcgacaggctttggcggtgggcagcgtgctgctcagcgctatcaccttgggtggctggacgctgttcaagcacaaagacaaaggcccgctgctgctgtcggcgcgcgatgatgccgacggcaagcactacgctgtcggctatcgcctggacggcaagccggtatttgccacccaggtcggccagcgctgccatgacatcatcaaccacccgaccttgccgattgcactgttcgtcgcccgtcgcccaggcaccgagagctacctgatcgacctgcgcgacggcaggctgctgcaaaccatcacctcgaacgccaaccgccatttctatggccatgcggtgatccacaagagcggtgactggctgtacgccaccgagaacgacacctccgaccccggtcggggcctgttgggggtgtataagttcgaaggtgagcggctggtgcacagcggcgagatatccacccacggcatcggcccgcatcaagtctcgtggatgcccgacggcgagacgctgatcgtggccaacggcggcattcgcaccgaagccgaaagccgggtagagatgaacctcaatgccatggagccaagcctggtgctgatgcggcgcgacggtagcctgatcagcaaggaaaccctggcccagcagatgaacagcgtgcggcacatgggtatcgccagcgatggcaccatcctgaccgggcagcagttcatgggcccgtcccaggagcgttccgagttgctcgcgatcaagcgcccggggcagccgttcgtggcgttcccggtggcggatgaacagttgcaggcgatggggcattacaccgccagcgtggcggtgcacagcgaactgcgcctggtggcgttgacggcaccgcggggcaaccgcttttttatctgggacatggacaccgccgaactgcgcctggatgggcccttgccggactgtgcgggggtgggcgctgtggcggatgggtttgtggtgacatccggtcaggggcgttgccgcttctatgactgccgccagaaaaacctggtcgcacaaccgctgcaactaccggcggggctttgggacaatcacctgcacctgatctgaaattacccttctgtggctgatcgttcccacgctctgcgtgggaatgcaacccgtgacgctctgcgtcactggcgctaacggacgagacgcagagcgtctcaagaggcattcccacgcagagcgtgggaatgatcatgcctggcgcaccataaaaaaagggcctcgcatggcaaggcccttttcggggtcaatcgtttcaactttgcggcctcatcgcttgagacatgccgaacatgaataacagcaattcatggtcgggcttggccgccacactcgtcttggcaatgcgtggcagcaggcattgcccgccaccgtctaccgcactcaacacttgtgtacgaggttgttcccataccgccagggccagggctgcaacacccaatgccccgaccagaaacaaacctcgtgctatttctagcttcatctggttaaacccttgatagcgctgccaaacgccgtctcgtaaaagtagctgagttttttccagtcggtatcattccacgacgaatggcggcgcaattgcagcatatcgtgggacgcggcccgataagcggtcaggcgctggcggcatttctcgaaatccagcagggccacttccactgtcgccgcatcaggctcaccggtcacccgcacgaagatgtgcttgatatacaggcaaccgtgttgccagcggcctttgtgcatacgggccaaggtgccggccaactcttgcagcaggcgctcgtggaccgcctcgccatactgttggcggccaccggcggcgtaccagttttcgatctcgtcgaaaccgtccagggacgcggtcaccaacagggctttccattggtgctccgggtcgcgacgcgcctcgcaaaacaccagttccggcacacgcacatccagcaaacgcaggcctttgagggcatcacgctcacgcagcacggtcggacgcccaaaggggtgcagccaactgcggtaaatgtggccggtctggcgcttgcaatagagcaagcgaccgttagggctgatcacccgctgcacgccactttcaccaccccggcgacggttgggttcttccacccattcaccttgctgacgccagaaaaaatcaaatcgttcttcgggagctacatgactgcctactacgcactcaactgccatcctgttacctcttgcgcaatacatacactcgccacatggcgtagagcggtatgaagtccagggattcctgaacacggaaaccggcctgctcgaattctgcctcgacagtagcagccggtaacacaaaccggttttggtaaccttcctgctcaccttttttgcgacgacgcacttcgctgcgcttgcgcttccaggccttgaaattgccgtccacccacagcgaaataatcacgctgtcgcgggtaacacgttgaaactcgcgcagtattgtcagcctgtgctccggctcaccaatgtggtgcatcaagcgcatgcagaaaatactgtcgacggagttatctggcaaatcgatatcaaaggcagacgtctgcaaagggcgtacccgtttcaccacctctgccggctgggcagcggtggcgatcttcaacatcgacgccgaattgtcagctccgataatcacacggttgggtttttcggccagtaacggccagaagcgtccagcgccacacggcaggtccaacaccaggcccggctcaccggccatggccaatgcgccgcgcgccagttgctcgtcgcgtttgtgggacaaccggcgagccagattgtcctgatgcttgagcaaatatttctgcgcgtgttgatcgtcgtacttgtcagaaaattccagcttgatcggggaaggcatcttacgtctccagtaactgatgcctacgaccttaagcagcgaactgtgatcaacaggtcaactcgttgtgaaaatcttgtcctgtccaactgcatacatttcaagactttacagaaacattcagtagcaccgggccatcttcgccgaaaagcaggcagtctgcatcagcaaaacgacagactgaagggtcaggttttgactgggttgagctccacatgaaaacggcagccattgggctccatggtgctcaggcttacgctccagccctggctttcgcagatccgttgcaccagcgacaggccgaggccgaggccctcgccacgtttctcgctaccgcgcacgaacggctcgaacatcgcttcgcgcttctcttcggggatgccgacaccggagtcctccaccacgaagccactgggctccagcgtcaggcggataaacccgtgttcggtgtaatgcagggcattgcgcagcaagttgcccatcaccgcatgcaagaaggtggtgttgtagcgggtgtccagggggttgcctggcaggtagatcaacgccaggccttttttctcgatgggctcgcgccagataccgagcaggtcttcggccacctgggtgaggttgccctggggcgaactggcggcgtcgtcgtgtttggcgcgggcgagcatcaggaaggtctgcaccagctcgcgcatttcttcacaggcacgggcaatgcgctcgacctggttgcgacctcgttgatcgatggctgggttttcgcgcagcagttcgcaggaactggccaggaccatcaagggcgtgcgcaactcatggctcacatcgctggtaaacagctgctcgcgcgacaacgcctggcgcaagcggccgagggtggcgtcgaacgccaccgccagttcgcccacttcatcggcggcgtaatccggcgccaggggcggtgccaggcccaacagttggtcacgatgacggacctggcgggccaggcgtaccaccggcgccatcaccttgcgggccagcacccagccgaggaacgccgccagtgccaggctgagcacgaagcccaccagcaccaccgcaaacagcacgcgctcacgctcttcgaaatcgctctggtcttgcagcaacacataacgccgaccatcgaccacttcaaccatggcgtggtacgacagcgcctcacgaaacacctcatgaaacccagggtccagatggcgcaggtccttgggcagttcaaaatcgccacgcccgccgctgaaataaaacagctggtccggctccggccggtggctccagtcttcgacgctgtccatcaacagcaggcgctgcaggtcaccgcccaggcccgccgagatcaacttctcttccaccaggtgcaccgtcgcaatgatgcccacggcgaaggcccccgccaccaacgcactcatcaaggcgaaagcgatgatgatccgctgggcaaggctttgcttaaactccatcacgaccctcggccaggcgataacccacaccgtgcacggtttgcagtagcggtttggcgaaaggcttgtcgatcacttggcgcaattgatgaacgtggctgcgcaggctgtcgctgtccgggcaatcgtcgccccacagggcttcttcgagaacttcccggcgcaaaacatgcgggcttttctgcatcagcacggcgagcagtttcaggcccaccgggttgagcttgagcaggcgcccttcgcgggtgacttccagcgtatcgaggtcgtagttcaggtcacccacttgcagggcacgacgcccgccgccctgggcacggcgcaacactgcttcgatacgcgcggccagttccgacaaggcgaacggcttgagcaggtaatcatcagcgccagacttgaagccctgcagccggtcatccagttggtcgcgcgcggtgagcatgatcaccggcgtatcacggcgcgcgtcttcacgcaggcgtttgcacaaggtgtaaccatcgatgccgggcaacatgatgtcgagcacgatcaggtcgtaatgctcggtggccgccaggtgcaggcccgacaaaccgtcctgcgcacagtccactgtgtagcctttgagccccaggtaatcggccaggttggcgaggatatcgcggttgtcttcaaccaatagaattcgcatgggcagtgtctccgtacgcggtaacggccgtgttggctcgcgcagcttaaggccaagcgaggctcagggatagagcgcagagccccgccgataaaggttttcaactgtttgtagagccgaacaagtttttcactatagcttcacaaactgactacagcctcaggaagaagatcgccccccattgatctaaggaacatagacatgggttttttcaaaacagcgccaatgcgctatttgctgttgatcaccggtgcctggttagtggttttcctgctcacccgcagcgtgctgctcattacccacctggatgaagtcagcggcaacctgttgccggtgtttggcgtgggtttgctctacgacttgggtttcctggcctatgcagccttgccgcttggcctgtatctgctgctctgcccgcctgccttgtggcgccgccgtggccatcgctggttcctgcaagcggtgctgaccgtcagcctgttcgccatgctgttcacctcggtggccgaatggctgttctgggatgagtttggcgtgcgcttcaactttatcgccgtcgattacctggtgtactccgatgaggtactgaacaacctgctggagtcttacccgatcggcaagctgctgagcctgctggcgatgctggcactgattctgagcgtggctctgcgcaaacccttcaatgccgcgatggcagcgcccttgcctgcgctgcgtggccgtttggtcaacgccctgggcctgctggtgctcgccggcctcagcctgcaactggtcagccaggacagcccgcgcacccaaggcggtaacgcgtataacaacgaattggccagcaacggcccctatcagttctttgccgcgttccgtaacaacgaattggactacacccagttctacaaaagcctgccgaccgatgtcatcgccaagcagttgcacgccgaactcagtgagcccaacgcccgctttatcgaccaggacccgctggatattcgccgtgccatcaccaaccccggcacactgcgcaagcccaacatcgtgctggtgaccatcgagagcttcagcgccaagtacatgggcagcaatggcgatgcgcgtaacctcacgcccaatctggatgcgttgcgccaacagagcctgtacttcaataacttctatgccaccggtacgcgcaccgaccgcggcctggaagccattaccctggcaattccaccgacaccagggcgttcgatcgtcaagcgcatcggccgcgaaagcgggttcgccagcctgggtcaacagctctcggccatcggttatgacagcgtgtttgtctatggagggcgcggttacttcgacaatatgaacgcgttcttcagcggcaacggttatcgggtggtggaccagagcagcgtgcccgaagcagaaatctcattcaaaaacgcctggggcatggccgacgaagacctgttcaaacagaccttgaaactggccgacgccgattacgccaagcaacagccgttcttgctgcaactgatgaccacctccaaccatcgcccctacacctacccggacgggcgtatcgacatcaagtccggcaaaggccgcgacggtgcggtgaaatacaccgactacgccatcggccagttccttgaggcagcgcgccagaagccgtggttcgataacacgatcttcgtgttcgtcgccgaccacaccgccggcagcgcaggcaaggaagacctgccgatcaccaactaccagattccgctgtttatctacgcgcccaagctgatcgacgcacgggagtccgctcaactgtccagccagatcgacctggcgccgaccttgctgggcctgctcaacctgagctacgaatcgacattctttggccgcaacctgctgcaggacaacccattgcctgcacgggtggtggtgggcaattaccagcacctgggtctgtttgatggcaaggacttggcaatcctcagcccgcgccaaggcttgcgtcgccacgaccaggccctgggcgagagccaggagctgcgcgtcggtagcgatgaccccttgatccaacgggcgatcacctactaccaggccgccagttacgactacaaacagcaactgctgagctggaaagcgcccaaggaagaagctccagtcttaagcaaacgctaatcaaaaagccccgtgcaggtgagcgcggggcttttttaccaaggttcgtgatgaaatccccctcctctttaccggtttccaaaccgcttgatttctggctgtgcctgggcctgcctgccggcgctgcagtagccttgctgttgcttgaactgacgtcagtggacatggacctggccaggcatttctatagcgcagaggctggcggcttcattggccgctatagctttttccttgaagacatcctgcatgaccgtgccaagcaactggtgatcctgttttcggtgctggcgattctgggcctggtcggcagcttcatcctgcagcgactcaagccgtaccgccgtgaactggtgtgcctggtgctgtcgctgggaatggcgacggcgttcgtgtcgccgttgaaaaccattaccgccgtgcaatgcccctggagcctcaaggaattcggcggccaggaaacctacagcgaactgctcagcccgcgcccgcctaccgataaacccggccgctgctggcccggcgggcatgccgccaccgggtttgccttgttcgcctggttcttcgccctgcgggatcgacggccacgcctggcgcgctacgcgttcatctttgctgtcagcctgggcagcgtgttttccgtcagccgtatgctgcaaggggcgcactttttttcccacaacgtgtggacagcgattttttgctggctgatctgcttggggttgtattgcttgttgctgtaccggcctgcacggcaacggtcgtagctttctgtaagagcgagcttgctcgcgaaaaacttcaacgataacgcgtgcttgctgaatgaacgcggcgcctttgagtttttcgcgagcaagctcgctcctacaaaaaagccattagggctgcctgcgaaagccaacggtaaccacgatgcgaagcgagtcgctcttgatctgcttgtgatcttgatctcaggcgccccgttaaaccacgctggcnnnnnnnnnnnnnnnnnnnnnnnnnnnnnnnnnnnnnnnntggtggggcaagagccctttggttactttggggcttttccaaagtgacccgccgttggggcggaaccctaagcggccgttaccgcaacaatggatatgtacacaatccaactgtgtcgcctgccaggccgccttcgcgagcaagcccgctcccacattgggatcgcggggtgtcagggagattgccgtcggctggcagggcgtcatcgcaggcaagccagctcccacagttggatcgcgggggtgtctgggagaactgcgccagtcacgggagcaagctccctcgccacaggtccagcatgcaaccgtgcataaaaaagccccgcctgcatcactgcaggcggggctttttatagtgccgggtaaggctggcttacatcatgccgcccatgccacccatgccgcccatgtctggcataccgccgccagctgcgccttctgccttcggtttgtcagcgatggcagcttcggtggtcaggatcaagccaccgatggaggctgctgcttgcagcgccgaacgagtcaccttggttggatccaggatgcccatttcgatcatgtcgccgtagacgccagtcgcagcgttgtaaccgtagttacctttgccgttcttgacttcgttgaccacaacgcttggctcgtcgccggagttggcagcgatctggcgcagcggtgcttcaacggcacgacgcagcacagcgataccaacgttctggtcggcattgtcgccggtcaggttggtcagggcttccagagcacggatcagcgcaacgccaccgccaggtaccacgccttcttcaacggctgcacgggttgcgtgcaaggcgtcttcaacgcgggccttcttctctttcatttcaacttcggaaccagcgccaaccttgatcaccgcaacgccgccggacagcttggccaggcgctcttgcagtttttcacggtcgtagtccgaggaggtttcagcaacctgggcacggatctgcgcgatgcgggactcgatgtcgccttcaacgccagcaccgtcaacgatgatggtgttttccttggagatggtcacgcgcttggcgctacccaggttttccagggtggcgctttccaggctcaggccgatctcttcggagataacggtaccgccagtcaatacggcgatgtcctgcagcatggccttgcgacggtcgccgaagcctggagccttgacggctgcaaccttgacgataccacgcatgttgttcacaaccagagtcgccagggcttcgccttcaacgtcttcggaaacgatcagcaatggacggccggctttggcaacggcttccagtactggcagcatttcgcgaatgttggagatcttcttgtcgaccagcaggatcagcgggctgtccagctcggcaaccatggtctcaggcttgttgacgaagtacggagacaggtagccacggtcgaactgcatgccttctacaaccgacagttcgttttccaggcccgagccttcttcaacggtgatcacgccttctttaccgactttttccatggcttcggcaatgatgtcaccgatggagctgtcggagttggcggagatggtgcctacctgagcgatggccttggtgtcggcgcatggcttggacagatttttcagctcggcaacgatggcgatggtcgccttgtcgatgccacgcttgaggtccatcgggttcatgccggcagcgacggccttgtagccctcgttgacgatcgcctgagccaggacggtagcggtggtggtgccgtcgcctgcgtcatcgttggcacgggaggcaacgtctttgaccagctgcgcgcccatgttctcgaaacggtcttccagttcgatttcttttgctacggaaacgccatccttggtgatggtcggagcgccgaagctcttctcgatgatcacgttacggcctttcgggcccagggtcgcttttactgcgtcagccagaacgttgacgccagtgagcattttcttgcgggcggagtcgccgaatttaacttctttagcagccatgatcgatattccttaaatactttgtagtaacgggaaaatgagcgaggaaatcagtcttccagaacggcgagaatttcgttctcagccattaccagcaggtcttcgccgtctactttcacagtgttgctgccggagtaagggccgaaaacaaccttgtcacccactttcacggccagtgcgcgtacatcaccgttctccagggttttgcctgggccagcagcgacgattacaccgtggttggctttttcagcagccgaacctggcagaacgatcccgccagcggttttcttttcttcttcgctgcgacggattacgacgcggtcgtgcagaggacgaagcttcattgtcgatctctcctaattgtgtttttcatcggccggtatcaattccggcgggttaaattccggcggtgccggtcgcggctcgcggggcgagacgcggaagtctgtctgatgtcaccaccagaaaccttgcggtgaccgttacataagggcgcccaggcttattacaaggggccaaggatgaaattttttgtgtcgactcaagggtaaatgcaacacggcacccgaaggtgccgtgccagtgaagcggttacttagggtcgcggtgttcgaattcgccttcgatcacatcaccttcacgccccaggggttggcgtggagccggaccaccacggggttgcaggtcgtcggcgaacgcacgctggcgcatcgcggcctcttcagcacgctggcgcattttgccggccagcagcttgcgggtgaacggcagcaagagcaccaggccaagcacgtcgctgataaaacccggcaggatcagcaggccaccggccagggccatcatcaagccctcaagcatggtctgggcgggcagttcgccgcggttcaggctttcacgggcacgcagtgcggtcgccaggccggcgacacgcagcaccagcacgccaagcatggagcctacgatgatcaacagcagcgccgggaagaaaccgatcgcaccgctgactttaacgaatacgaacagctccagcaccgggaacagcagaaagagcaataaaaaagggcgcatcaaatggttcctcaacgcaagaatgccttgccagttcaccttagatgacgtcgccgttgtgtgaattcaagcagtggccgcggtttttttcggccagacttcagcgtgcgccaatgaaaccagggcttcgcgcacttgtgtcggcgtattgcagggctcggcaaaccctagccaatgtaacgattggccaatgcgcaggtgcatgccttcgctgtcgataccggccaactgcgcaggctcggtggcaggcaaaccgcccagctcgacgtaatgggcaatggctttggtgtgatcgctgttcatgtgctcgatcatgctgcgctcggccttgcccgcaaacgggttggccaaggtcaactggtcgacccaatggatcgcgccaaacccaccgatataacggtggcgcaccggcttgagcacccagaaatcgaaatcatgggctttgtggtagttggccgaatcagggaagtagcggtagtagcgctcggcagcggcttcgatggcggcggcgtcttccagcttctcggcttcggccaggtaggtcagacgcccgacggcttgtacatcgtcggcctcacgctcccccaccagcagcgaacacttggggtctttttgcaggttatgggtgtgctgggcaatgcggctgatcaggatcagcgggcggccctgctcgtccaggcagtagggcaccaccgagccgaagggaaagccgggcatggctttggactgtgtggcgagcgccccacggtattccttgagcaacagctctcgggcgttcttggcaacctgcgtgctcaatataggattcctcggatgttccgcgacccatggcatatgggaatggatctcaacacaaggtaatcaatatctgcgcaggttgccagaggggccgacgccggtttaccaggccacgccaaagcctgcggtgtagcgggtcttgctcaagctgctgtcggagtcgccgctgatgacgtcacgctcagccttgaggttgagggacgcccactcggtgactttgtagcgcaggcccatctcggcatccagggagtaatcggccggaccgtccagaggcttgcccaattcgccgttggtgaagaactctacggtcttgcccaccaagtagcggttgtagttccacttcatggccagagagtagaagttgtccttgccgccgtcggcatattcgtaatcggtacggttgaccagcgacccgagggagaacgcgcccaactcatcgtcccagaactggtagcccgggccggtacccacggtgcgctggcgcgccaggtcttcgaccttgtcgcgcttgtaggtcaggcgcccctgccagaaccagtgctcggtgataaagcggtccaggtcgtattccagggcccagttgtcggtggtggtgacgtcgtcctggaactcgcggttgtactcgcccttgcccgtatggcgccactggccgtgacgggccgaggtcttgaagtcgatgtcgtagtcgttggtgtctttgtccgcgcgcttgtagtccagcgccaggtcgacgttacccttccacaccaggtcttcgatcaccggcttgggcttcatgatctgttggatacttgccagttccaccgtcttgggcgcctcgccattggccagcaccaccttgccatcatcggctgcctgcaacgacttggccttttcaccggtgtaggcgtcctgcttgaccaacagttcctggtcgctttccagggtcttgacctgtttccagtccaccgggatggagcctgcgtaggtggtttggatcagcaacttgccaccgtcgaagactttgatcttgccggtgagccgatcaccgtttttcaaccagacggtatcggcgagcaagggcgtggaagcactgagaacagcaaggcacaacagggttctggacaacataagcaggtacggggctcaggataggcgaaaaaaggggcgttatagtgttacatggctagaactgactcaaggatttatattgagttcaatactcatcgccatgtttacagacgtttctgacaaaacaacgacgatctcaacggatatgcccacagtgatctcacctgccgacacgccacaaagccccgccgagatacgccgcactgccctttacctgacactgtcgcaggtgcccgaaggctgcgtggtcagttacggcgagctggcacacctggcaggtttggggcgtgctgcccgttgggtcgggcgcaccctgagccagttgccgcaggacacgcgattgccctggcatcgggtgctgggtgccggcggtcggataagtctgccggtgggcagtgcctcgggtgacgaacaacgtgcgcgtttacgtagcgaaggcgtcactatcctgaacaatcgtgttgatattcagcgtcatggctggcgcccggtagagcacagcggttagagtgcgcgctttgtttccgcaaatctgaggcagactccagcccatgccccgtaaaacctggcgcgccgcgctcgccgcctatgccagcccttcgacgttagtgctgttgttgctcggtttcgccgccggcatgccttacatgttggtgttttcgacgctttcagtgtggctgcgtgaagccggtgtggcccgcgagaccattggctatgcgagcctgatcggtctggcctacgccttcaaatgggtctggtcgccgctgctcgaccaatggcgcctgccgttgctgggtaaactggggcgccgtcgctcgtggctggtgctggcccaatcgctggtgatcctcggattgatcggcatgggtttttgtgacccgcaaaaacacctgtcctggttgatcgccattgcggtggtcgtcgccttcgcgtcggccacccaagacatcgctgtggatgcctaccgcctggaaatcgccgacgacagccgtcaggccgccctggcggcaagctacatgtctggttatcgcatcgccgccctgctggccacggccggtgcgctgttctttgccgaaggcttcggctccaccggtttcaactataaacactcggcctggaccggcacctatgtgctgttcggcgtgttgatggtgccggcgttgctcaccacgttgtttatgcgtgaacccgatgtgccactgcgcacccaactgcaggccgggcgctacagcttcgcgcaccagttggtgtcggtgtttgtactgatcgtgctgttggtctcggtgccggcgatgtttacccagctgtataacaccgactttgccagcgtactgttccagggcgtgagcctgtgggaactgctgatggaagaccgcgccttcctgcgtgccatcctctatatcaccctcactgcgctgtgcctttcggccatgggccgccggggcctggcgccggtgctgacgccggtcaacgactttatcctgcgctaccgctggcaggcgctgctactgctcgggctgattgcgacctatcgcatgtccgacaccgtgatgggcgtcatggccaacgtgttttatatcgaccagggtttcaccaaggaccagatcgccggggtgagcaagatcttcggcctgatcatgaccctgctcggtgccggcatgggcgggctgttgatcgtgcggttcgggatattgccgatcctgctcatcggcggcgtggcctcggccggcaccaacctgctgttcgtgatgctcgccgacatgggccccgacctgcagatgttgatcgtcaccatctccctggacaacttcagttcgggcatggccacctcagcattcgtggcttacctgtcgagcctcaccaacctcaagttctccgccacccaatatgcgttgctcagctcgatcatgctgttgctgccacgtttgatcggcggctattcaggcgtgatggtggagaagttcggttaccacaacttctttatgatcacctgcctgttgggcgtgccgacgctgctcctgattgcgttgcattggttccaggagaaccgccgcgcccggctgaatcccccgccggaagactgacacgactcagtcaatgtgggagctggcttgcctgcgatagcgggcaagccagctcccacacaagcgacggttacgacagatacaccctgccacctcacgcctgtactccggcgacaagcgcccgtacaatcccaagtcatttcaagtccaagcaaccgacaacggcctaccatgcgtaccagtcaatatttgctcgccacacagaaagaaacgccttccgacgcggttgtgatcagccatcagctgatgctgcgcgccggcatgatccgcaaactggcctcgggcctgtacacctggttgcccatgggcttgaaggtgatgcgcaaggtcgaagccatcgttcgtgaagaaatgaacgctgccggctctctggaagtgttgatgccgagcacccaaccggctgagttgtggcaggaatccgggcgctgggaagagtacggccctgagttgctgcgttttaaagaccgtcatggccgcgatttctgcgccggcccgacccacgaagaagtcatcaccgacctgatgcgcaatgagctgagcagctataagcagttgccgctgaacctgtatcagatccagaccaagttccgtgatgaaatccgcccacgcttcggcttgatgcgtggccgcgaattcatcatgaaggacgcctattcgttccacgccgaccaggcttccctgcaagcgacctacgaccgcatgcaccaggcctactgcaacgtgttcacgcgcctgggcctgaagttccgcccggttgaagcggacaacggctccatcggcggtgccggctctcacgaattccacgtgctggccgagtctggcgaagacgatatcgtgttcagcaacggttccgactacgcggcgaacatcgagaaggccgaagccataccacgtgaaacctcgcgccctgctcccaccgaggagctgcgcctggtcgacacgccagacaccaaaaccatcgcggccctggtggagaaattcaatctgccgattgaaaagaccatcaagaccctgatcgtgcgcgccgaagaagaaggcaagctgatcgccctggtgatccgtggcgaccacgagctcaacgaaatcaaggccgccaaccagcctggcgtagccagcccgctggtcatggccaccgatgctgaactgcgcgacgccattggcgccggtgccggttccctcggcccgctgaacctgccgctgccgatcatcatcgaccgttcggtagagctgatgagcgacttcggtatcggcgccaacatcgacgacaagcattacttcggcgtgaactgggagcgtgacctgccggttccgaccgtggccgacctgcgcaacgtcgtggccggcgacccgagcccggatggcaagggcaccctggagatcaagcgcggcatcgaagtcgggcacatcttccagttgggcaacaagtacagcaaggcgatgaagtgcgaagtactgggcgagaacggcaagccgatcaccctggacatgggctgctacggcatcggcgtgtcccgcgtggttgccgctgccatcgagcagaacaacgacgagaaaggcatcatctggagtgacgccctggcgccgttccaggtggccctggtgccgttgcgctatgaaaccgagcaagtgcgcgaagccactgacaagctgtacgcggagctcaccgctgccggttttgaagtgctgctcgatgaccgggacaagaaaaccagcccgggcatcaagttcgccgacatggaactgattggcatcccgcaccggatcgtggtcagtgaccgcggcctggcggatggcaatctggaatacaagagccggaccgaagccgaagcccaaccgttgccggtggctgacgtgctgtctttcctccaggcgcgtattcgtcgctgaaaaccagatcaagagaagtcatgttcaagcgaaacaccagagccctggggggcgccgccttgtgcggcgccctgctggtcagcggctgcgccaatcagatgtcgcaacgcagcgagcacgaggagcgggtcgagcgtaagttgctcgaccacagcctgcagatcgatgtaggcgaacccaaagtgttggagctgccgcaacgccgggttcgcattcatgagcagaagaccttcgaggtcaccgaattcgaagtcacccgtcgctacgaccgctacacgccctaccagccttggcgcaaactctatgagatgcccctgggtgccgtggcgctggtggcgggcgtgggtgccaacgtggtgaatatcttcgccctcggcaacctgcccacgagcgtgacccgtgactggctgagctacggcgtggacggcatcaacccgttcatgaacgtgcaatcccacggccgtgcgcaacagaacctggccgctatcgatgaagtccagcgtgacaagcgcctggagtattcgagcctgccctggagcgagcgcccggtacaagtcaccgccggcaagcagacccatgagctgaccaccgatcgcaacggcatactgcgccttaacctgttggacagcccctttgccgagcaagacctgaaccgcgtcaccaccttgaagatcagtgtgcaagatggccaggacgacgtgcataccgactcgaccctggcggtcagcaacacactgcgcagcaagctgctcgaagcccatgccctgatatacgacgacctggaagatgacgaagtgaaccagtgggtgcaccgagtcaaacgcctgtcggagctggggctggaagaagaggccagcgagctggaacaaagcctgattgaactgacgcgcaatgacccggagttgcagcaggagtttgtgcaggcgctgaccaaggatgcggggcggttagtcgccgatcctggcgcacgctgatcgtgcaatacctgtgaagatcaaactgtgggagctggcttgcctgcgatagcggtgtatcagttaaagcattcttgactgacactccgctatcgcaggcaggtcagctcccacatttgtttcgggtttttaccaggaaaactcgagctgttcgttgccgccgctcaggtctagcaaccgtacgcctatccccagcaaccgcaccggcttgcccccgcgattgaacgcctgggtcatcaactgttcataactctccagatcccgtcctgccccggcctgctccagcgtcgtctgggtaaagtcatgaaacttaactttgacgaacggcttgcccgcacggtagctgctgtcgatacgcgccatgcgcccggccagggtttccatcagttccggcagtttcgccaggcaacttgaaaggtccggcaggtccacgtcgaaggtattttctacactgatggattgccgacggctgtcattttgcaccacgcgatcatcaatcccacgcgccaagctccacaggcgctcgccaaaactgccgaattcgcgcaccagtgccagtttgttccagtcgcgcaattgcaggcagtcttcgatgcccaggcgcgccagcttgtcggcggtgaccttgcccacgccatgcagcttgctgacacgcaactgcgagacaaagtcttcgacttggtccggcgtgatcacgaacaggccgttgggttttttccagtcgctggcgatcttggccaaaaacttgttgggcgccacgccggcagacacggtgatatgcaactggttggagacccggcgccgaatgtcctgggcaatacgcgtggcgctgccgccaaaatgcgggctgtcggacacgtcgaggtaggcctcgtccagcgacaacggctcgatcaagtcggtgtagtcgcgaaaaatcagctggatttctttggatgctactttataggcatccatgcgcggcttaacgatggtcaagtccgggcacagcttcaaggcatgacgtgacgacatggccgaacgcaccccatacgcccgcgcttcgtagttgcaggtggcgatcacgccgcgccgatctgccgagccaccgacagccaagggcttttgtgccaggctcgggtcgtcgcgcatctcgatggcggcgtagaagcaatcacagtcgacgtggatgattttgcgctgcgtcatataaacggggtgttaaccaacgggtggccagtatcgcactcacccctgtatatagcaccagtagtttgaatcttctgcctgagcggtaggaaatttcgtagatgaatatattttctcaatcgaatatcgcatcccaatagagctgaaagccttgccctgcctggcttcaagccctcaagaggcacctcatcaagcgctaaccgattgaagcacaagcgcttttcttgagtttacgggttgacacactcgcgttcctctgtagaatgccgacacacagacgcgggatggagcagtctggtagctcgtcgggctcataacccgaaggtcnnnnnnnnnnnnnnnnnnnnnnnnnnnnnnnnnnnnnnnncacagacgcgggatggagcagtctggtagctcgtcgggctcataacccgaaggtcgtcggttcaaatccggctcccgcaaccaaacatcaaaaaaggctactcgaaagagtggccttttttgtatctgacgaaaaagttcttctgaaacaatggcatggcatctttcatgaaaccgtagacggtttgcagagtccatctcattgcacgctatgctcactgctcaagcgctccccctctacgaccaatggccgcagtcgccgcgcccggtgatccgcgttaatatttgtaattattttgtccatagggattggtaacttggctggatacctccatcctgtcgcgcacaatccacgaggtgattgatgcgcgccaactcgtctgaaccacaagacaccgtcacagcagaacaaccgatcactcccacccgtttgcggtggctggacctgttgagcaagtatcgccagcccatcggcctggccgtgacgcttctgctgtttgcaatcgccctgatcgcctgccggcacctgctgctggagctggacctctacgccctgcacgattcgatcctggaagtgcccaagcccgccctgttgggtgccttcgcggcagcggtcgccggcttcattatcctgctcggctatgagttctccggtgcgcggtatgccggcgtgcaattgcccgccaaaaccctggccctgggtggtttcaccgcctttgccattggcaacgccattggtttgtcgatgctctcgggcggttcggtgcgctaccgtttatatgcacggcatggcatcggcgcctcggaagtggcgcacatgaccgtattcgccagcctggcccttggctgtgccctgccgccgctggccgcgctggccacgttgagcaacttgccggccgcttccacttacctgcatttatcgcaaagcctgctcggtggcattgccggcgccgtgctgctgttgtcggtgctgctgtgcatcggcatctatcgccgccgcctgccggaacagccctaccccgacaacctgctggtcaaggccgggcgccgtaccctgcgcctgccaggccgacgcctgacgttcctgcaactgatcatcaccgcactggacgtcgccgcagccgctaccgtgctgtatctactgttgccggaagcgccgcccttcggcccgttcctgttggtgtacctgctggccctggccgccggtgtgctcagccatgtgccgggcggcgtgggcgtattcgaagcgatcctgctggcggcctttgccgacaaactcggtgccgcgcccctggccgcggccttgctgctgtaccgcatgatctacgtggtgctgcctctgctgatcgcctgtgtgttcctgctggtcaacgaggcccagcgcctgttccagacccagcagagcctgcgggtagcgtcggggctggcagcgccagtattggccgtcctggtttttttgtccggcgtggtcctgctgttttccggcgccacgccagaaatcgactcacgcctggaaaacatcggcttcctgatcccccatcgtctgattgacgcgtcgcacttcggtgccagcctgatcggcgtgttgtgcctgttgctcgcccagggcctgcgccggcggttgtcggccgcctggatgctgaccatggtgttgctgctggttggcgccctgctctcgctgcttaaaggcttcgactgggaagaagccagcctgatgaccatgaccgcagtgctgctggccatcttccgccgctcgttctaccgcgccagtcgcctgaccgagttgccgttttcgccgctgtacctggtggccagtgtgtgtgtgctcggtgcctcgatctggctgctgctgtttgcctatcaggacgtgccctacagccatcaactctggtggcagttcaccctcgacgccaacgccccacgtggcttgcgttcgcttctcggcgccgccgtgttgctggtgatcgtgtcgctgacctggctgctgcgcacggcacgcccggttatccacctgccgaccccggaagaactggagcgcgccagcaagatcctgatggcctcgtcccaacccgacggcggcctggcgctcaccggcgacaaggcgctgctgtttcaccccaacgatgaagccttcctgatgtatgcccgtcgcgggcgtagcctggtggccctgtacgacccgatcggcccgacccagccgcgcgccgagatgatctggcagttccgcgacctgtgcgacatccaccacgcccgcccggtgttctaccaggtacgcgccgagaacctgccgtactacatggacatcggcctcaccgcgatcaagctgggtgaagaagcccgcgtcgacctgaaacgctttgacctggaagccaagggcaaagaaatgaaggatttgcgctacacctggaaccgtggcacccgggacgggctgtccctggagatctgcgaaccgggcaaggcgccaatggatgaattaaaagtcatctccgatgcctggcttacaggtaagaatgtgcgggaaaagggcttctccctgggccgtttcagcgatgattacctcaagcactttcgtatcgcgatcattcgcttcgaagggcgcccggtggccttcgccaacctgctcgaaacctacaaccatgacctggccagcctcgacctgatgcgtgcccacccggacgcgcccaagttgaccatggaattcatgatggtgggcctgattcaacattataagagccacgactacgcgcgcttcagcctcggcatggtgccgttgtcgggcttgcaaccgcgccgtggcgcaccgctgacccaacgcctgggttcgatggtgttccgccgtggcgagcaactgtataacttccaaggtttgcgccgcttcaaagacaagttccagcccgactgggaaccccgttacatggctgtgcccgcaggactggatccgctggtggcattggccgataccgccgccctgatcgcgggcggcttgactggattggtgaaacgctgatgattcgacgctcctggcggtatgtattggctttagtggtgctgcttgcgctgatcgcggcgggtggcttctggtactggaaccgccctgccccgcagccgacgctggagcacttgccccaggccgacggttcggtaatgacccgcgtgaccccggccagcaacgcaaaagcccgcgtggccgtggcggtgatggccgacgaaaccctgaccgacagccaactgatggccctgagccagggcggtgctgcgcaactggttcaggtggtgctgcccaaagatgactgcgcattgcaggaaaaagccctgcaagacgccctggcccagctcaaaggcccggcgaccctggtcagcggcatcggccctggcgccgcactcgcctggcgctggctggccacccagaacgacgacaaggccaacgccatctccgtgggctttgccctgaaacaggaaggctgcaacgacccgctgccgaaaaccgccgcccatggcaactggctggtggcgtggaacgataaccccgacgatgagagcgccagtttcgtacgtgacacaccgcgcgctacgaccagcatcagcgactacgacattcattacccacaggtgctgaacaacgaactgcgcaagcaactggtcggttcggacaacggcggcctggcgattccggtggtggaagtgcctgccggccaagccaaggacaccgtgaccctgttcctctccggtgacggcggatggcgcgacctggaccgcgacgtggcgggcgagatggcgaagatcggctacccggtggtgggcatcgacaccctgcgctattactggcagcacaagagccccgagcaaagcgccaaggacctcaccgagctgatgcaacactaccggcagaaatggggcaccaagcgcttcgtgctgaccggttactcgttcggcgccgacgtactgccggcgatctacaaccgtatgccagagaacgaacagcaacgggtagacgcgatcatcctgctggccttcgcccgcaccggcagctttgaaatcgaagtggaaggctggctgggcaacgccggcaaagaagccgccaccggcccggaaatggccaagctgccgcctgaaaaagtcgtgtgcatctacggtgccgaagaagtcgacgagagtggctgcaccgacaagaccgccgtgggcgaagccatgaagctgccgggcgggcatcacttcgatgagaactacccggcgctggccaagcgcttggtggagattattgtcaagcatcaggccaaagccgaataattccagcttaatccaagacccaatgtgggagcgggcttgcccgcgatagcgcgggctcagttacagtagcgttgactgacagtccgccatcgcgggcaagcccgctcccacagtggtacgtggtgttgatgaaaactagcgcggttcgatgtgcgcaatcatcagttgcaccgtctcattgccacgaaactcattcacatccagtttgtaggccaactccacccaccgcacggtcgggtttggccacacttcgcggtccacaccaaaggcaatgccatcgagcttcaccgacccgcattcgctcttgagcaccactttcaaatgccgctcgcccaccacccgctgctccaccaactgaaataccccgtgaaacaacggctcgggaaagtgctgcccccacgggccggcatggcgcagggcgcgggccagttccaggtgaaactcttccaccgccagggtaccgtctgaaagcaggcggccggtgaggtcttcttcgcgcagttgccgacgcacttcggcatcaaaggcttcggcgaacaacgggaagttggcttcaggcaaggtcagccccgccgccatggcgtggccaccgtatttggtgatcaggttgggatgctggctggcgacgactgccagcgcatcgcggatatgaaagccctgcaccgagcgtccagagcccttgagcaggccatcgccggcatcggcgaaggcgatggtcgggcggaaataacgctccttcatgcgtgacgcgaggatgccgatcaccccctggtgccactccgggtcgaacaggcacaagccgtacggcatcgactccaccggcaagtccttgagctgggccagggcctcgcgctgcatgccttgctcgatggatttacggtcctggttcatgccgtccagttgcgcggccatttcccgtgcggcggcgaagtcggtggtgagcaggcattcgatgcccaggctcatgtcatccaggcgtccggcggcattcaggcgcgggccgaggataaaacccaggtcggtggaggtgatacgcgcatgatcacgcttggccacttccagaatcgccttgatccccggccgtgcccgaccggcccgaatacgctccaggccctggtgcacgaggatgcggttgttggcgtccagcggcaccacgtcagcgacgctgcccagggccaccaggtcaagcagttcaccgatgttcggctggggcttgttgtcataccaacccaggctgcgcaaccgcgcacgcagggccatcaacacgtaaaagatcacgccgaccccggccagggccttgctggggaacccacagcccggctggttcggattgacgatggcgtcggcggccggcagttcatcaccgggcaagtggtggtcggtgaccagcacctgcaaccccgccgccttcgccgccgccacgccttcgacgctggagatgccgttgtccacggtgatcagcaactgcggctcgcgctgcagggccaccgcgacgatttccggggtcaggccatagccgtattcgaagcggttgggcaccaggtagtcgacatgggccgcgccgagcaaacgcaagcccagagtgcccacggtgctcgccgtggcgccatcggcgtcaaagtcaccgacgatcaggatgcgctggcgctgctccagggccgtcaccagcaagtccaccgcggcgtcgatacccttgagctgctgatagggaatcaaccgcgccaggctcttgtccagctcggcttccgattgcaccccgcgtgcggcgtaaaggcgggtcaacagcggcggcagttcaccgagaaaaggcaggacggcgggcagtgggcggggatcgatacgcatacggtggtgataacttctctttaatcattgtaggagcgagcttgctcgcgaaggtggttaacgatgacgcgtgtgcctgggtgatcgtggtgccctggagtttttcgcgagcaagctcgctcctacagggagccgggttcagccaaggtttaaccgcgctcgccgaccagccattgcagttgcacttcatgctggccacggtcatcggtcacaaagatcgtgccttcgctgatcatcacgtcccacttgatgacgcggggcatgtccttggccagggtctccaacacttcctggggcacggcagcgatatgtacgtttttcaggttgttggccaccggcaccaccttgccttcccacacgcgcaggctgccataggccagcaggctggtgcgttcggtgcggcgcgagcaccaggtcaggcggtcggcatccggctggccgacttcgatccagtgcaaaacccgatcatccaggctcttttcccacagggctggttcgtccacatccgacaggccacgcccgaacgccaattgctcgttgtaccagagggcgtaggccagcaggcgcacggtcatgcgctcttcggtttccgaagggtggcgggcgatggtctgtttgacgctctcatacaccgagcggtcgaggtcggtgaggttgagttcgaatttgtaggtcgtggacggctgggccatgaacgggcttctaaagacaaggaaagacggccagtctaaccgatggcgagggcattgaacgaatactgcgctgcatccacgcagctcgcctatgttaaaaagcagtacatcatcgtcccgcgcttgtaaggatccccatgtcgcttaatgccaaaccacttgccggcctgaaagtcatcgaactgggcactctgatcgccggcccgtttgcctcacgcatctgcgccgaattcggcgccgaagtgatcaaggtcgaatccccggacggcggcgacccgctgcgcaaatggcgcaagctgtatgaaggcacttcgctgtggtggttcgtgcaggcccgcaacaagcagtcgctgaccctcaacctcaagcaccctgagggcctggcgattctcaagcaactgttggccgacgccgacattctgatcgaaaacttccgcccaggcgtgctggagaaactcggcctgagttgggaaaccctgcacgccctcaaccccaagctggtgatggtacgcctctcgggcttcggccagacggggccgatgaaggaccagccggggtttggcgcggtgggcgagtccatgggcggcttgcgctatatcaccggcttcgaagaccgcccgccagtgcgcaccgggatttccatcggcgactcgattgccgcgttgtgggcggtgatcggcgcgctgatggcactccgtcaccgcgaggtcaacggcggtctgggccaagtggtggatgtggcgctgtacgaagccatcttcgccatgatggaaagcatgatccccgagttcgatgtgttcgggtttatccgtgagcgcaccggcaacatcatgcccggcatcaccccgtcctcgatccacaccaccgcagacggcaagcatgtgcaaatcggcgccaatggcgatgcgatcttcaagcgcttcatgcaggtgatcggccgtgacgacttggcgaacgaccctgcactggccagcaatgacgggcgtgacactcgccgcgacgagctgtacggcgtgattgatcgctgggtcaattcgctgtcgctcgaccaggtgattgagcaactgaataaagccgaggtgcccgccagccgtatctacagcgccgaagacatgctgggtgacccgcaattcctggcccgggaaatgttcctcaaggcgcagttgccgggcggcaaggacttcaagatgcccggcatcgtgcccaagctctcggacacaccgggcagttgcgaatgggtcggcccgcaattgggtgaacacaacagcgtggtgctcaatgccctgggctatgacgcggcggctatcactcgcctgcgcaaggatggcgcaatctgacaaattgcaggcaaaaagaaaccccgagcagtggggagacaactcggggttaaacgtggcctacaaagaccagtacagcaagctacagacaccggagcacaatgcctgctcttgctgttacaaactctgactgaccaccgtgtaggaaggttccgaagaaaaataatgtttcatgccagtgcgccgccacgggtttgtgaggcgttgcgcaaggcagcgatgactgaaggttccaggcgcccttcggcgattttcaggtcgcgaagcaggcaatccaccacatccaccagcgcgcgcttatcgctcaattgcgcacgatcgacttcacgttcaaccacgatggcgccaccggggttcttcacggttaccaggcagtcgtcgcgcataccggcagaggtcagcgtaacctgataagggctcagtgcttggctgagcaataggttgatactttccatctcgatcaccactcaatcattcgaaaaaggttcgaaaaacaaaaatgtcacgaagaggctgacattcaagtgacccgtgctcaaagcagaaagttctaccttttgtgtaatccactgcttgaggaaaacgagcatgcacggaaaagatgacagagaaaaaacaacggcgcacaggctagaatccctggattatcccgggagcctgccttgagagccgcgtctgaaccgcccttgcgtatcgtgattgccgacgatcacccgattttcctgattggcctgcgcgccgtgctcgaacgtgacccgcacatcagcatcgtcggcgaggccaattccccccaggccctcagtgcgttgttgcaacacagtacctgcgatgtggtggtgaccgacttcatgatgcccgtcgagccccaggccgacgggttgcgcttgatcgagcaactgcgccggcactatccgcaactgcccattgtggtggtgaccatgctcaacaatgccgggttgtttcattccatcctggcattgggtgtgatgggcctgctgagcaaggccagcctggccgatgagctgccccaggcgatccgccaggtgcgccagcaacgcacctacgtggcccaaaccatccgccaggcgctgagcctggccggggaagtcggcgctgatcgactgcattcccaggagcacctgtcaccccgggagctggaggtgattcgcctgttggccggtggcatgacggtgggcgagatcgccgcgcacctgcaccgcagcaagcagaccgtcagcgcgcaaaaagtcagcgccatgcgcaagctcgggctggtcaatgatgccgccctgtttatttacgtgcaggaacacgggctggcctagcctgaaatgcgatccattgcttgagcgccgcggcctccatcggccgcgcgataaagcagccttgcagccacgccgcgcccagttcgcccacggcgtgatagtcggcggcggtttccacgccggtgaccactaccgcaacgtccaggcgcgccgccatgctcatggcgcccgccaccaccgcggccttgcggtcatcattggccatcccacaggcaaacgccggggggattttcagctcggtaaaaggcagttccagcaaatgctgcaggctggtgccgcccatgccgaagtcgccgatggacaactggcaacccaacatgcgcaagcgcagcaacccggtgacatgggcgctgtcggttttcagcgtcgaggtttccaccaactccagggtcaggctatgggcgggcacaccatgaagttgcagcaaaccttgcagcacctgggggaagtgctcacgctccagcatgcgcccgggaatattcacggccaccggcagcacttggccgctgtcgcccatcacctggttggccaggccaagcgcctgctccagcacatgccaggtaaacgcctcttccatgccggcaaactccaacaccggcaggaactcgtcaggcagcaatagctcaccgtcctgcaactgccaacgcgccagcgcctccaccccttgcaacacaccggcctgactgacgatgggctggtaccagaccctgccacaggctgcgatagtcgcctggctgacatccgccgagggcggcagttgttcctgctcgctcaagctcagcagttgacggacgcgctcccaggacagcaccgctggccctggacgcaagtgctcctgacagtcgctcagtacttgcccgatcagcttggccgaagccggcttgggcaagcacgccaagaccttgagccccaattggcgcgccatgttcgccacgccttccagaacgtcgggctcggcgttgctgagcaggatcaatacttgggccaggcggcgttccgccaactcacggatcaacgccaggccatcgccctgctccaggtacagatcgcagatggcgatatccaccgggcctttgctgtccagggattggcgggcgatttcgaccgtttccgcggcgcgtacattgaacacgccgttggcattgagcatctggtgcagggccatcagttgaaacgggttgtcttcgaggatcaggacgttcagggatcgcatgggtaagtggtgtcggtacagggaaagtcctgcacagtagtcatatgctgcggtgtgccccataggacgtgtcctaaatgtggtctgtaggagcgagcttgctcgctcctacaatgtgtcaggcatccagatagggttgcaggtcgcgacgaaacgccttgagcacctcggacaagcgcaaccagggtgcttcaagctcggcgccgcgctgttcacgggcgcactgctcaagggcgacgcaggccttggcgagtggcagtgcgtccaccagcgagcaaatgcccttgagccggtgcagcgatgcattcaagcgtgccacgtcgcgctcggccagggcacccgccagtacctcgtgttcgtggtccaggctcttggccagttcctgcaacatgctgtgcagcactggcccgtcggcctgggtcatggtgcgcagggcctggatatcgaacgaacgcaggggcgccacgcgggccagcacttgggtccagtgttccagagtcacgggcttgaccagcagttcatccataccggcgtcctcgcagcggcgttgttcatctttcatagcgttcgcggtgcaaccgatcagcgcaagacgaggccgttgctcctcggcttcgaggcgtcggatcgccgcactcaaggcatagccggacatgccgggcatctggcaatcggtgaccagcacgtcaaaacgctgctcacgccagcgttgcaacgcggcctcggccgactccagggcgaccacctggtgaccgaggaactgcaactgctgcgccagcaccaggcggttggccgccaaatcatccaccaccagtatcgacaggctgcgccccgtcggtgacaacgtcgcggtaggcattgccggcacatcatcggtgctgacccggtccaggcgcaggtcaatgcacaccaccgtcccctcgcccaccacactgtcgaggtaaatgctcccgcccatcaattccaccagttgcttgcagatactcaggcccaggccagtgccgccgtgttgcgcggcggtcaaggcgcttacctgggtaaatggcttgaacacccgcggctgttgctcggcgctgatgcccgggccgctgtccttgacgcacaggtgcaggtattcactatcgcgctcatcccgctggcaagtcacgctgaggtgaaccccgccccgctcggtgaatttgagcgcattgcccaacaggttgtgcatcacctggcgtaaccgcagcgggtcgaaccagtaatagccctgagcagccggatcaaacgccagggtcagatgcaggcccttcttttgcgccgtggcttcgaacaggctctggataccctcgaaaaaactcttgagctcggtggtctgtggcgccagttgcaggtgaccggcctcgatcttggccaagtccaggctgtcgcccatcagcgcaatcagctcgcgcgccgaacgatgggccacttgcagcgcctcggaaaccggctggccgcttgccaggcaacgctcttgctccagttcgagcaagccaatgatggcggtcatgggggtgcgaatctcatggctcaaggccgagagaaatgcacttttggcgtagttcgcctcatcggctgcctggcgggcgtccatcagctggcgctccaggtctttgcgttcgttgatgtcgatccagccgcccaacaacccctgcaagcggccctgagcgtcgaaaaagggcacggtccactggtagacgtgataagtaccgccattgagctccaattgccggtcgacaaacaacgactgctgcgtggccaattgctccatgtgcccttcgtgcaggcgcgccgccgtggcgtcgggcacgaccttgctttccatcagcgtcaggccctggatcagctccagccgggtcgccagttgctgttcatagcttttgttgcaggttaccagccgcccatccaggtcgcggacaaagagcgggttgggcataccgtcgagcaatgcgcgcttgaacgccagctggtcattgagccgttgctcggcctccagccgttggcggatctggcgcttgagccggctgttccacaccaacgacaccaacacaaacagcagcgccgtggccatcgtccaataggcccagggcggtacacgctgccagacgggcgggggaatcgtcacggcaccgatccaacgcaggcgcaaggcactcaactcagccaccggcaacgcctccagggctttgttcagaatgttcagcaattcaggctggtccttgcgcaccgacaggcagttggacgaccactggccgtcgacactgcggcccatacgcaggccttcctgcgcataactctgcacttccacttcagtctgtatcgtggcggcggcctcgccccgtcgtaccaactcacgggcctgggtgtaattgtccaccaggcgcaacttgatgcgcgggtggtcatggcgaatctggctctccatgacgtggcgtgccggcaatgccagcaccttgccgtccaactggttcaaacccgtcaggggcgcggcatcggcacgttcgataaacacccagccggagccgccaaaaccatggctgaagttgagcagcgcactgcgctcctgattcaccgccagggtggtgttcatctgcgcccggccggtttccagccattccagggtttgtgcggtagaacccacctcttcataaatgaactgcaaaccggtcatgcgcgagatgcgattcaacaggtcgacattcaagccaacccagtggccgtcctggtccctgaagatataaggcgacatttgctgggctaccaccacgacatggggatgctcgcgcacccaggcccgttccgatgtcgacaacgcaatgcgctcaccactgatgccgacaccgagcccggtggtccagcgtgcgaggatttcgcgctgcaccgactcgtcgaggcttgccagcgcgcggttcatcatcgcccccaacaacggatcggcctggcgggtggcgaaggcaaaaccgatgggcgccaaccggctttgctccttgatctgcaaccccagataaggccgcagcgatttataggcgcgcacaatcacttcattgccgataaacgcatcgacatcgccttgcttcagggcttcgaggccgctgtagaggttgggcgcgagcatgatgtggctgtcggggtaggcggcgtgaaccttctgcacgttggcgtagccgtcgagtaataccagcttcttgccggccagatcgtcgccttgggtatcgtcgcggcgcagcaccaccactgaacggtcgggcatgtagtccggggtgaactgcaggccgggtacatctcgctcgtagccattggcactggtgagaatatcgatggtgccattgcgcagcgcttcaaccgcctgggcgcgctcggagaagcccagcacttgcatgggcacacccagccgcgcaccgaccaggctcaagtaatcggcgctgatgccttggtagcgattgcggtcgcgggtgatgtcgatcggctggtagtcatcgatcgagatgcccaccttcaatgtccgatgcgccgccaaccactgctgctcggtcggcgccaggggcataggttcaagcgcgataaacgccggcaccagtttgaacggcaggctgacagcggccaggctcatgggtacctgggtgagccacaacaggcacaccagcttcaacgtccattggatcaacacctgcaccggttgggtttccttgattgggcgaatgggcaagtatggctcgccagaatgaaaaagcccgtcacgaggacgggcttggccgactgcaaaaaaagctgactgttgccccaccatgtcttgggtggatgaaatcagcttgaatgtggggcagcacaaagatgcccctcggccgtcaggcagccctgtcgatcagagcggcttgccccgattgccgtgctggctgacgaacgcctgcaccgccttcaggtcattggccaacacggtgcagcgctcttcgcgctcgaacaggtcggtcaaatgctccggcaactccagggccttgccaatgccggccttctccaccgcttccgggaacttgaccgggtgcgcggtaccgaggatcaccattggaatatccaggctgcggcggcactcgcgggcggctttcacgccgatggccgtgtgcgggtcgagcacttcgccggtctcggcgtagacttgcgcgatggtttcgcaggtttgcgcgtcgtccacggccagggaatcgaacagcttgcgggtttcggtccagcgctcttgttcgacgctgaaaccgccaccttgcttgaaactgttcatcagctcggccagggctgcgccgttgcgaccgtgcatgtcgaacagcaggcgttcgaagttcgacgacaccatgatgtccatggacggcgacagcgtggcgtgcagggtttccttcacgtactggttgccgctcatgaagcgatgcaggatgtcgttgcggttggtggcgacgatcaactggttgatcggcaggcccatgttgcgcgccaggtaaccggcaaaaatatcgccgaagttgccggtcggcaccgagaacgacaccgaacgcgccgggccgcccaactgcagcgaggcgtggaagtagtagacgatctgggccatgatccgcgcccagttgatcgagttcaccgccaccaggcgcgtgcccttgaggaagctctggtcagcgaagctgttcttgaccatttcctggcagtcatcgaagttgccttcgatggcgatgttgtgaatgttctcaccgaagatggtggtcatctggcgacgctgaacttcggacacacgcttgtgcgggtgcaggatgaagatgtcgacgttctcgcagtgcttgcacccttcgatggctgccgagccggtatcgccggaggtggcgccgatgatcaccacgcgctcgccgcgcttttccagcacgtagtcgagcaggcgaccgagcagttgcagggcgaagtccttgaacgccagggtcgggccgtggaacagctccagcacccactcattgccgttcagttggcgcaggggcgcgatggcgttgtgggaaaacacgccataggtttcttccagaatcttcttgaagtccgcatccggaatgctaccggtcacgaacgggcgcatcacgcggaaagccagctcgtgatacggcaggccggcccaggaagcgatttcttcctgggtgaagcgtggcaggttttccggcacatacaggccgccgtcggtggcaaggcctgccagcagaacgtcttcgaaattcagggccggtgcctggccgcgggtgctgatataacgcatgactggctcctctaaaacattctcgaacaggggccgccgaatggacggggcccctggaacaaatcggttagttcaagtgttcgacgcgaatccgcaccaccgggcccactacgccttgcaaggcttccagggcatggatggcatcgttgatgtgctgttcgagcacgcggtgggtcagcaggatcatcggcacctggccgttttgctcctcgacttccttctgcatgatcgactcgatattgataccgcgctccgacaggatgctggccacctgggccaacacgcctggatggtcctgggcctggatgcgcaggtagtaggcactttcgcaagcttcgatcggcaggatcgggtgggccgacagcgagtccggctggaaggccaggtgcggcacgcggttttccgggtcgctggtcatggcgcgaaccacatccaccaggtcggcgatcaccgacgacgcggttggctccatgccggcaccagcgccgtagaacagggtggaaccggcggcgtcgccgttgaccatcaccgcgttcatcacgccgttgacgttggcgatcaggcggtcggccgggatcagcgtcgggtgaacccgcaactcgataccggctggggtgctgcgcgccacgcccaggtgtttgatacggtagcccagggcttcggcgtagttgacgtcggcggtggtcagcttggtgatgccttcggtgtaggccttgtcgaactgcagcgggataccaaaggcaatggacgccaggatggtcagcttgtgggccgcgtcgataccttccacgtcgaaggtcgggtcggcttcggcgtaacccagagcctgggcttcggccagcacgtcttcgaaggtacggcccttctcgcgcatttcggtgaggatgaagttaccggtgccgttgatgatgccggccacccagttgatgcggttggcggacaggccttcacggatcgccttgatcaccgggataccaccggccaccgcggcttcgaacgccacgataacgcccttctcgcgggccttggcgaagatctcgttgccgtgcacggcgatcagcgccttgttggcggtgaccacgtgcttaccgttctcgatggccttgagcaccagttcgcgggccacggtgtagccgcccaccagctcgataacgatatcgatctcagggttggtggccacggcgaacacatcgttggtaatcgcaataccggtcgtttcgaactgaggctttggcgaacgcgtggcaatctgcgccacttcaatcccgcgacctgcgcggcgggaaatttcttcagcgttacgctgaagtacgttgaaggtaccgccaccgacggtccctaacccacagatgcctactttgaccggtttcactgaagaactccccatgaaacggccgacgctaggtcggccgtgaaaacagccgcacaactgcggctctcaattaatgacccaccgacggttcggcgggccatgatcgtcaaaggctcaacgataaatgcttacttggcacccagtgccagtttggcaacttgcggcgccggctggtagcccggaatcacctggccgtcggccaaaacgatggccggtgtaccgttcacaccaatggactggcccagggcgaactgcttggaaaccgggttggcgcatttggccgacttgatttccttgccatcgaccatcttgtccatggccgctttcttgtcggccgagcaccacaccgcctgcaactgctcgtcacccggcgaacccaggccctggcgcgggaaggcaacgtagcgcacttccacgcccagcttgttcagcgccgggatttcagcgtgcagcttgtggcagtacgggcacgtggtgtcggtgaacacggtgatgtgggtcttggtttcgccaatagcggggtaaaccacggtttcagccaccggaatgccgttgatcagcttggacacgcccaggcgctcggccttctcggtcaggttgaccggcttgccgtccttgagctggaacaggtagccctggacgatgtactggccatcggcactggcgtacagcacgcggctgcccttgagcttgacttcgtacaggccggccatggggctggcgctgatgctttcgataggcgtgtcgagcgccaggttggccaggctcttgcggatggtctgctcggccgcatcatcggcgagcgcaaaggtggaaaccaacgcaatggctgcggcggcaataatctgggtcaagcgcatgggaactcctgaaggcagaggcagggacgggagcagaatactgatctggaccacaatggatgccgtcccctttgcgaaccggcaaagcctaccacagttgggcgggagggcagcccgcgacaggtaaaatgggccatttctgacggttttatccgcgtgggtggtgcttggcgtgcatgtcctgcaaacgtgcgcgcgccacatgggtgtagatctgggttgtggataagtcgctgtgcccaagcagcatttgcaccacgcgcaaatccgcgccgtggttgagcaagtgggtggcgaacgcatggcgcagggtgtggggtgacagcgccttgccgatcccggccactttggcctggtgcttgatgcggtgccagaaggtctggcgggtcatctgctcgccgcgcaggctggggaataacacgtcgctggggcgcccgccgagcaattcgtggcgcgcatcgcgcatgtagcgctcgacccacacaatcgcctcctcgcccatgggcaccagccgctccttgctgcccttgcccatcacgcgcaacacgccctggcgcaggttgacctgctccagggtcaggctgatcagttcggtgacgcgcaggccgcaggcatacagcacctcaagcatggcgcggtcgcgctggccgatggcctcgctcaggtccggggccgcgagcaaggcgtcgacatcggcttccgacaaggacttgggcaacggcctgccgagttgcggcatgtcgatttgcagggtcgggtcgacggcgatgagtttttcccgcagcaggtagcgataaaagccacgtacaccggagagaaatcgcgcggtggagcgtggtttgtagttctgctccaggcgccaagccaggtgatcgaggatcagctcgcgcccggcattgatcagttcaaggtttttctcctgcagccagccgttgaacagcgccaggtcactgcggtacgcctggcgcgtgttgtccgacaggcctttttctaaccagagggcgtcgaggaagcggtcgatcaggggatggtcaatggcaggcatgggcactcaagcgacttagcacaaggcaatacgcgaattatttagtgaactgtgacaagagccattagtctttcatagcccgctatttcaaggaacaggaagctttaatgaacgaacaacagattttgttggcttttggcggcattggcgtggccgcactcggctgccagtggctggcctggcgccttaaactgccagcgattctgtttcttctcctgagcgggattctggcaggaccgatactcggatggctcgacccgcaggaaatgttcggccctctgttgatgccattggtgtcgttggcagtggcgctgatcctgtttgagggcagcctgaccctgcacctgtcggaatggaaggaaatcggcagcgtggtgcatcgcctggtcacggttggcgccctgtcaacctgggcagtgatcaccctggccacccactggctgctgggttttgactggatgctggcgctgctgttcggcaccctgacactggtcaccggcccgacggtgatcgtgcccatgttgcgtgtggtacgccccaaagcctccatcgccaatatcctgcgttgggaaggcatcgtcatcgatccgattggcgcactgctggcggtagtggtgtatagcttcatcatcgccagtgcgtcgggcgacggcttgagccacagcctgctgaccttcggcggcgtcatcctctgcggcagcctgttcggcatcgccggtggctgggtgctggggcagatcatgcgccgccagtggttgccggaatacctgcataacctggcgacgctggccggtgtactgggcatcttcatcgcctccaaccaggtgatgcatgagtccggcctgctggcggtcacgctgatgggcatgtggatggcgaacatgaaaggcgtggatgtacggcacatcctgcacttcaaggaaaacctcagtgtgttgctgatttccgggctgttcattctgctggcggcacgcctggacctgaacgccatgatcgccctgggcccgtttgtgttgatcctgctgttgatcatccaattcattgctcgcccgttgaacgtggcgctttcgacctttggctccgggctgaactggcgcgagcgtgcgctgctggcctggatcgccccacggggcattgtggcggcggcggtgtcagcgatctttgcgatccgcctggatgaggccggccacgaaggtgcgttgttgctggtgccgctgaccttcgcagtgatcatcggcaccgtggtgctgcaaagcgctacggcacgccccttggcccgcctgctcaaagtcgctgagccggcacccagcggcttcctgatcgtgggtgcgaacggcccggcgcgggcgctcggcaaggcgttgcagcagttgggcagccgcgtactgctgaccgactcaagctgggaaaacatccgcgccagtcgtatggaaggcttgcctacgtacttcggtaacccggcctcccagcatgccgagtcccatctggacctggtcggcctggggcatctgctcgcgctctcgccttctggcgaactgaatgccttggccaccatgcgttttcgccatgacttcggccatcgcctgttcgccctggccagcagccaggaaaaccgtcgcaccgacaagcacaaggccagccatgaacaccgcggacacttgctgggcagccaacccttgagctacaccaaattggccagcctgctgggccaaggcgccgagttgtacagcaccagcctcaccgacggctttgggtgggagcagtaccaggcgttgcacggcgagcgcgccaccttgctgtttgccagggacaccagcggctgggtacacgtggtctcgcccgagagccacttgaagcctgtagcgggctggaccttgctggcggtcattcaaccgcaggccagcaccgccgaataatcagtcaacaaagcctggcagtaccgggacagggcgtttatctgcgtcaatcgcgacgaagctgaacacgccctggatcgctttttcacggccatcagcgctcatgctctccacgaacacttcaacctcgaccttgaggctggtgttgccaaccttaatcacccgaccgatcagctcaacgatagagccagccgggatcgcgtggttgaagtcgatacggtcagtggagaccgtcaccaaaggtaagcggcagaaacgcgtggcggtgatgaacgacacttcgtccatccatgccagggcggtgccgccgaacagggtgttgtggtggttagtggtgggcgggaacacggccttggtcacgtgagtgaccgacagatcggtgcggcgctggatttcttcgaggcgggtggtcatggtcaataccaacagataggcaaatttcaggcacaaaaaagcagcccgtaggctgcttttttctgcatcgggaagctggacttaagccagtttttccttgatgcgagctgctttaccggacaggtcacgcaggtagtacagcttggctttacgtacgtcaccgcgacgcttaacggccatgctgtcgatttgcgggctgtaggtctggaaagtacgctctacgccaacaccgttggagattttacgaacagtgaaagcactgttcacaccacggttacgcttggcgattaccacgccttcgaacgcttgcagacgcgaacggtcgccttccttcactttcacctgaacgacaatggtgtcgcccggggcaaaggtagggatctctttggtcatctgctctgcttcgagtgcaaggatgattttgttagtcatgctgtgctcctaaggtaagtcaatggacctaccatcgatacgttgttaactatcgtcccgcgcgaggatgtattcctcgagcagcttcttctcttctccagaaagcgagcggctttccagaagatcggcgcgtcgttcataggtccgaccaagggactgctgtaaacgccaacgccggatgtgtgcgtgattgccacttagcaatacgtcgggaacacgctgatccacatacacctccggacgggtgtagtgcgggcaatccagcaaaccatccgtgaaggaatcttcctccgcggagtccgcatgccctaaagctccgggcagcagtcgtgtaaccgcatctatcaggaccatcgccggcagctcgccgccagacaggacatagtccccaatcgaccactcttcatcgacatgagcttcaataaaacgctcgtcaatgccttcatagcgaccggcaatcaggatcaaactttcctcattcgccagttcgcgtaccgccgcctgtttcagctgacggccttgaggggacaggtaaattaccttcgccttctccccggcggctgccttggcctgaaccaacgcatcttccaggggcttgatcttcatcaccatgcccgggccaccgccaaatgggcgatcgtccacagtgtgatgtcgatccgtcgtgtagtctcgcgggttccaacaggtgagctgcaacagcccctgtttcaccgcccgactggtgatgccgtactcgctgatggcggaaaacatctcgggaaacaaactgatcacttcaatgcgcaaattagccacgcttagaagtccgcgtcccattccaccttcatctcgcccgcggccaggtcgacggccaacacgcattgctcggtatagggcaacaggcgttcacggtcatccaggctgccagcgcaaggcttgaccaccattacatcattggcgccggtttccagaagatgatcgattttccccagcaattgcccgagttgatcaataaccttcagaccttccagctggtaccagtagtactcgccgtcggtcaattcagggaacaggttgcgcggcacgcagatctcataaccggccagaagacgagcttcttcacggtcatcaagacccttgagctttgcgaccaggaacttgtcgctcccgcgtccactgaccagctcaacctgcttcacactcccttcgcgcttgagcgtccaggttttgtactgcaacaggttttcagtcggatcagtaaaggaatacaccttcacttcgccgcgaacgccatgaacagagtaaatcttgccgataacgatcaaatcatcagcaacagctggcgtcgcgttcatattgctcaggctgcggccttagccgagtccttcaacagttttgcaacgcgctcggatggctgtgcgccaacgctcagccagtaggctacgcgctcttggttcacggacagacgaacttcttgaccacgagcaacagggttgaagaaaccaacctgttccttgtgcgaaccgtcacgcgggttgcggctgtcggttacggtcaagtggtaaaacgggcgctttttggagccgccaagggcaagacggattgttagcatgtgaacatcgttcctgtagtcggtgctgcaaatctaaatgcacagcgggcataggtgcccgaaaggccgcatattctaaggaatatccggacttttgcaaatgtctttttctggcgcctatcagcgtgccattcagatctgctatagagccgtcggttaaaacggcgagtcagcgcccgccaacggcgggtttgctggagatcccacatccctgtggggcggagcgcaagcaaggcttgcgctcgaatactttacattttcggcatgccgccgccgggcaacataccgcccatgccgcgcatcatcttggccataccgcccttggcggagaatttcttcatcatcttctgcatctgcttgtgctgcttgatcaagcgaccgatgtcctgcacctgggtgccggagcccatggcgatccggcgtttgcgcgaaccactgatcagctcagggtcgcggcgctcggccggggtcatggagttgatgatggcttccatctgcttgaactgcttctctgccgcaccctgggcgttgcccatttgcgccaggttcacaccgccgatgttgggcagcttgtccatcaggccgccgaggccgcccatgttcttcatctgttgcagctggtcgcggaagtcttcgaggtcgaagcccttgcccttcttcagcttcttggccagtttgtcggccttgtccttgtcgagcgtggcttcggcctgctcgatcaggctgagtacgtcacccatgccgagaatgcgcgaggcgatacgctcagggtggaacggctcgagcgcttcgctcttctcgcccataccgatgaacttgatcggcttgccagtaatggcacgtaccgacagcgcggcaccgccacgggcgtcgccgtcgaccttggtgaggatcacgccggtcagcggcagtgcgtcaccaaaggccttggcggtgttggccgcatcctggccggtcatggcgtcgaccacgaacagggtctcgaccgggttgatcgcggcatgcagcgccttgatctcgcccatcatctcttcgtcgatgtgcaggcgaccggcggtatcgacgataaccacgtcgatgaacttcagcttggcttctttaatagcggcgttggcgatgtcgaccggcttctggctcaggtcggacgggaagaaggtcacgcccacttcgcccgcgagcatttctaactgcttgatggccgccggacggtacacgtcggccgacaccaccatcacggatttcttcttgcgctctttaaggaagcgcgccagtttgccggcggtggtggttttacccgcaccttgcaggcccgccatcagcacgacggctggcggcacggcgctgaggttcagatcttcgttggccgcgcccatcaggctttcgagttcggcctggacgatcttcacaaaggcctggcccggggtcaggctgcgggacacttcggtgccgaccgcacgttccttgaccgagttgacgaagtccttcaccaccggcaaagccacgtcggcttccagcaacgccatgcgcacttcacgcagggtgtctttaatattgtcctcggtcagcttggccttgccggtaacgtggcgcagcgtctgcgagagacggtcagtcaagttttcaaacatgcgcgatcctttcaggccctactcatcgaaatgcaggtagaccgaggtaatggcggcccaggctgggggaaagcgctattaaaaacagcgttcgccgagcctgcggcgtgggcaggtcgcggattatagcgaagactgcgcccatgcacacccgctgtctggcgcgggagtctttcgtgcaacgcaggtgtgtgccaaactcaacgcctttcgggcttgcctaccaggatttatgctccctttgtcacccagtttgctacccagcctcgccgccgccattttgtatgccgctgcgaccctctatcagggcactcgtctggcccaaggcgccaaagcggacaaacgtctgctcgtcggccttggcgtgctggccctgctggcccatgccgccagcctgttcacccacctgatgaccccggttggcctgggcctggactttttcagcgccgccagcctgatcgccgcggccgtcatcgcgctgacgctgctggcctgctaccggattccggtggagaacctgctggtgctgctattccccctgggaatgctcacggtgctgctggcgcagttcacccccaccggcaccgtacaggtgatcgacgaggagccgggcatcctcgcccacatcctgctgtcgatccttgcctacggcatgttcaccatcgcggtgttccaggccctgctcctgctgctgcaggatcaccagctcaagcacaagcacccctccgggctgatcaagaacttcccgccgctgcaaaccatggaaagcctgctgttcgggttcctgtgggccggttggacgctgttgtcgctgtcgctgatctccggttggctgttcgtcgaaaacctgtttgcccagcatctggtgcataaaaccttgctggcgtgcctggcgtgggtcgtgttcagcgtgctgctgtgggggcgcaaccgcctcggctggcgggggcacaaggccatccgctggaccctggccggtttctgcctgttgatgctggcctatttcggcagcaagctggttcgcgaatacatcctgcatatctgacgagcagtgatcatggacaacttgcccttagggccgatgctcgctgtaattgccctgcttattctatgggcagcactgtttaccgccatcgaagccgcacaacagcatctgttggccctgcgccccggcacccgccagggcgacaaggcggccgcacgcctgagcttcccgcgccatagcctgatcctgtgcaacagcctgtgccgcgccgccgtggtgattctctgcaccctgctggcgatctatgcctgggcagagaacgggccctggctgggctggctgatttcctgcgcagggctgctggtgctggccgactacctgccccgcaccctggccacccgtcacccgcaagccgtgctgggctttggcaatacattgctgggcgtgccgctgaaaatcctctaccccctggcctggctgctcaatggcatcagcctgctgttattgcgcccgtttgcacgcaaatccggcgtggtgaaaaacagcgacgagcccctgcccgaccatgatgacgacccagagcccgacaccgacgccgaccgcactcccggcctgcccggtatccatgccctggacaacatcacggtcaacgacattctggtgccgcgcagcgaagtggacggcatcaacctcgatgagccgatagaggacattatcgaacagttgcgcacctcaccacgcacccgtttgccggtgttccacagcgacatcaaccaggtgcaggccgtgctcaatacccggcaggtccaacacctgctgcctgacgccagcctgaccaaagaggccctgctcgccgcctgccacgagccttacttcgtgccggaaagcacgccgttgcagctgcaactgctgaacttccacaagcagcagcggcgcctgggcatggtggtggacgagtacggtgaagtgttgggcatcgtcaccctggaagatattctggaagagatcgtcggcgaattcgaaagcgatcaggctgtggataacccgcatatcgaagcccagcccgatggtcgctacatcatcgatggcgccgcctcgatccgcgaactgaacaaaagcctgggctggcacctgcccagcgacggtcccaagaccctcaacggcctggtgaccgaggcgctggagaccatccccgattgcgcggtgtgcctgaaagtcggccgttatcgcctggaaatcctcgagaccgaggacaaccgggtgagcaaggtgttgatctggcataccagccatgtgccggtggccgcctgacctcagcaggctcaacccggtcaatgtgggagctggcttgcctgcgatgcaggcgactcggtccttcaattgaaccgaggtgatgctatcgcaggcaagccagctcccacattgatccagttccaggccatagatcctcaccagccccttgttggatccttagcccccttcctataatccctgcggcttacccaagccccgcccgaccgcgtgctacccgcacccagcgtgtcctggcaccgccttaccatgtccgaccggtgtttgctcccatcccgagccgccccgcgcacagccctgatccatgggtgttcgaccaataataatccgcgtccaaacgcgcaataaccgtcagggataacgtcatgagcaccacctatcaagaggccacgagcgccgccccagccaactcaactgcccgcgtcgccaccgcgagcatcgtcggcaccgccattgagttctacgatttctacatctacgccacggctgccgccctggtgatcggcccggtgttcttcccccagacctccggcaccgcgcagatgctggcctcgttcctgaccttcggcatcgcctttatcgcccgcccgttggggtcggcgttgttcggccacttcggcgaccgtatcggccgcaaatccaccctggtggcttcgctgctattgatgggggtatgtaccaccttgatcggcttgctgccgggctacgacagcatcggtgcctgggcgccgattctcttgtgtgttttgcgcttcggccaaggcctgggcctgggcggggaatggggcggtgcggccttactggcaaccgagaacgcgcccaagggcaaacgcgcctggttcggcatgttcccgcagttgggcccgtcgattggcttcctggcggccaacggcttgtttctgattctggccatgagcctgaatgacgagcaatttcgcagctggggctggcgcattccgttcatcctcagcgccgcactggtgatggtgggcctgtatgcgcgcctcaaactgcatgagacgccggtattcgccaatgccgtggccaaggaaaaaccggtgaaagtgccgctggtggagctgttcagccagcattggctgccggtactgctgggcgccgcgtcgatggtggtgtgctacgcgctgttctatatcaccacggcgttttcgttgagctacggcgtttccaccctgggctacagccgtgagaccttcctcggcctgctgtgctttgcggtgctattcatggggctggcgacaccattggccgccttggccagtgatcgctacgggcgcaagccggtgttgatcgtcggtgcggtcctggcgattctgtcgggctttaccatggagccgctgctgacccatggctccacctgggccgtggcgctgtttttggccctggagctgtttttgatgggcgtgacgttcgcaccgatgggcgccctgctgccggaattgttcccgacccgcgtgcgttataccggtgcatcggcggcgtataacctgggcgggatcgtgggggcctcggcggcgccgttcttcgcgaccaagctggtggcgatgggcgggctgagttatgtcggggggtatgtgtcggcggcagcgttgctgagtttgattgcggtgctgtgcctgaaagagacgcgggataacgacttgaacaaggttgcctgaccccatgctcgttcccacgctctgcgtgggaatgcagttagggacgctctgcgtccccaagcgcgacgcagagcgtcacaagaggcattcccacgcaaagcgtgggaacgagcgtggcggtttagagctctacaacaactgcttgggaagcacgggtcgccttggcccgagctgcttcaatcgactcgtcccgcgccagtgccacgcccatgcggcgctggccgttcacttcaggtttgccaaacagacgcaacgctgtatccggctcgctcagcgcggcgccaaggttggcgaatgcggtctgggtggactgcccttccaccagaatcaccgccgacgccgaagggccgaactggcggatcaacgggatcggcaggccgagaatggcgcgtgcgtgcagggcaaactgcgacagatcctgggaaatcagggtcacaaggccagtgtcatgggggcgcggcgacacttcgctgaaccacacctgatcgcccttgatgaacaattccacaccaaacagaccacgaccgcccaaggcttcggttaccgccttggcaacgcgctcggattctgccaaggcaaccgggctcatagcctgtggctgccaggactcttggtaatcgcccttctcctggcgatgccccaccggcgcgcagaaagtagtaccaccgatgtggcgcacggtcagcagggtgatttcgtagtcgaagtcgataaaaccttcgatgatcacccggcccttgccggcacgcccgccctcttgggcgtagtcccaggctttctgcacgtcgtcggcgctgcgcaacaggctctggcccttgcccgacgaactcatcaccggcttgaccacgcacggaaagcccaggtcctggacggccttgctgtagtcttcgaaggtatcggcgaagtggtacggcgaggtcggcaggtccagctcttcggcggccaggcgacggatgccttcacggttcatggtcagcgacgtggcgcgggcggtggggatcacggtgaaaccttcggcctccagctcgaccaatgtcgcggtggcgatggcttcgatttccggcacgatgaaatgcggcttctccgcctcgatcaccgcacgcaatgcagcaccgtcgagcatgttgatcacatggctacggtgcgccacctgcatggccggcgcattggcgtagcgatccacggcaatcacttcaacgcccaggcgctgcagttcgattaccacttccttgcccagctcaccgcagccacacagcaaaacgcgggtcgcggttggcgacaatggagttccgattcgggtcatctcaggtcctcaggggagcggatcatgggggagaaaggccggcattttacatgaactgcaaaaattggcctcagttggcgacagcccgccggcggatgcgccaggccatgatcagccagaccacggtgaccccggcgaatttggacaccaacgccgtgcccgccaccgccggcgtcagtgcgccgatcaggccgaaaaagataaaggtatcgaggggaatgctcagcgccgaacttatccacaggcggtcatgcagcgggcgcttggtgatgctgaacaccagccagtcgatgcactcggacaccgcaaacgccgtggcactggccagggcgatggacgggtcggaggtgatataggacagcaccagcgccgccagcatggcgatgattgcgccatggccgaagcgggtttgcaccatgtcgcgcaggataaataccaggccgccccaggcggaccagataacgtccaggtgcggggcggtggagaaggcgaagttgatcagcacgacgctgctgatataggcgatcaggaaaaacatggaggatggacctgtgggcaatgccgcacagggtacacaattacaaggatgtcgtctggcagggcctcatcgcaggcaagccagctcccacatttgacggtattcacacatcaagggtgggagatggcggcctgtcaggcgccggatttcccaggggtcatccacatcatcccgctcgccaccgcccgctcatggcacaaccccagcaccacccggcgctcggcgttgtccatgcggctccagcgcgtgatttcatccacattgcgctggcagccggtgcagatatcgtcatcatccagtgcgcaaatgctcacgcagggcgaggcgaccggtcgttcaattgtgctcattcctgctgctcagccaggtcacgggcataacgctgcgcgttatgcacatagtgcgcggcgctggcttcgagcatgcgcttttgcgcctcggtcagctcacgcaccactttgcctggcgagcccatgaccagcgagccatcggggatttccttgccttcgccgatcagcgagttagcgccaatgatgcagtgcttgccgatcttggcgccgttgaggatcaccgcgttgataccaatcaggctgtagtcgtcgacggtgcagccgtgcagcatggcgttatggccaatggtcacgccagtgcccagggtcagcgggtagcccatgtcggtgtgcatcacgctgccgtcctgcacgttgctgttcttgccgatcaggatcagctcgttatcgccacgcaataccgcgttgaaccagacgttggcgccctcctccagcttgaccttacccaccagggtggcattgggtgccacccagctgtgggggtgcatctcgacgcgggcgtcgcccaggcggtacttcatggtttttcctcacggcttgccatttaaacgatggcttatagattgatgaagctcttgggtggctggtgcaggctgatcttggcatcgtcatagagcaggttgatcagctcgacaatcatgattgccgtcagcccccagattttgtattcgccgaaccggtagctgggcacataccaactgcggccctggtaatcaatgcggtgggtatgttcgcgtgggtcctgtcggaaaaagtccaaaggcacgctgaaaacggcggcaatctcggcgtcgttggccaggtattcgacgtaatcggggaccacgcccacatagggcgttacgcgaatgccgtgcagggaaatcagcgggctcaacgggccaatgacttcaaccagccccggcggcaggccgatttcttcttcggcttcgcgcaaagcggtaaagatcaggtccgggtcttcggggtcgcggcgcccgccgggaaaggccacttcgccaccgtgggtcgacagcccgctggcgcgcagggtcaggatcagctcgggttcgtcactgcgggtaatcggcaccagcaccgccgcctcggggaaacgcccgtcggtttccagggtatggggggtgtgattgcttacccggcgaagtagctcgtccagcatgagtcatctcggtctgttggctaccttgcatcatgcaccaaagcgtgcgagcgcccaaccccaaaaccgcagagctgtcgctaaacgacaacttgcaggaacgcccggcaccaagccaagatgtgcccattctccaggaaccccagcatgaatttctgcagccagtgcggcaaaccggtgacccaacgtattcccgaaggcgacgcgcgcctgcgttatgtatgcgatcactgctcgaccattcattaccagaaccccaatatcgtcgccggtaccgtgccggtgtggggcgaccaagtgctgctgtgccgccgcgccatcgagccacgcctgggttactggaccctgcccgccggctttatggaaaatggcgagaccgtcgaacaggccgccatgcgtgaaaccctggaagaagcctgcgcccgggtgcgcaacttaagcatctataccctgatcaatgtgccgcacatcagtcaggtgcatatcttctaccgcgccgaattgatcgatctggacttcgccgctggccaggagagcctggaagtgaggctgttcgacgaagccgatatcccttggtccgagctggctttccgcacggtcgggcgtaccttagaatgcttcttcgctgaccgtcgccaacaggcgtacccggtacgtagcgaatctgtgccaccgctgtccaagcccgcccaataacaagccggccaatgtcgccaaagggataccgtttcaatgcgttggttgcttgctctgatctgcctgtcgttcgccacgctgtccccggcctccacggtgcaaacccttggcggtaaaacggtcgagaaagtcctggtactcaagtccgcccaccagctgcagttgatcaacgacggcaagccgttcaagacctatcgcatttccctgggcaagaaccccaagggccacaagctgatcgaaggcgaccgccgcacgcccgaaggcctctactggctcgactggcgcaagaccagcgaccgcttcaacctggccatgcacatttcctacccgaacatcagcgacgccgcccgcgcacgccgcgaaggcgtgaagccgggcagcatgatcatgatccatggcacccccgacactgaagactacccggaacagtggtttcacaccctggactggaccgacggctgcatcggcatgcgcaacgtggatatgcgcgaagtgtggaacctggtcaaagacggcaccctcatcgagattcggccgtaatcccacgccgttcgtaaaataattcgaaaataattcctgccccaggcagcgcttgccggtgaataccagttcaccgcgcgggaccctgcacttatgcgcgccacaaagacctctctaataccacttgataccaagccccattaaagtgccttgaaaccgggattcgcaccgttttggtagcattgacatggtatttaagtggtattagttttcggccattaccgggcgacaacactccaataacgcatcggaaacctgacagatgaaccccatcctggccctgcgccccgacgacaagcaatccacgccgctgtacctgcaactggcccgcagccttgaagcagcgatccatgccggccagtggaaatcggaacaggccctgccttcggaacgcgccctcagcgagcagttgagcatctcgcgggtcaccgctcgtaaagcgctggaagtgttgctggctcaaggcctgatccgtcgcagccaaggctccggcacctttatcacgccgcgcctggaacaacccttgtcgcgcctgtcggggttcagcgaaatgctgcggctcaagggttttgtgcccacatcccagtggctggaacgcgacatcaccccgccgacccatgaagaactgatccgcctgggcctgtcgcccaccgacaaagtggcgcgcctcaagcgcctgcgcaaagccgatgacacggtgatggcgattgaaatgactgccatgccagcgtcggtgttgccccacccccaggccatcggcaattcgttgtacgaatacctggaaagcatcggcaagcccatcgtgcgcgccttgcagcatatccaggcgatcaatgcctcggatgagtttgccgcgctggtgggcatcgcccccggcaccgccatgctgctgatgacccgcgtgggctacaccgccgacaacacgccgattgagatcaccgacacctactgccgcaatgactactacgactttgtcgcagagctgcgccgccatgattattccgccgaattgcgaacttagagaactgcccatgactgaagacaatatcctcacgcccagcggctggatgcgcggtcgcctggtgcatgagcacggcaaggttgtcgccattgacggcacgccgtgcgacccggccgacaacgacctgccctacctgctgccgggctttatcgacctgcatgtgcatggcggtggcggcgcggacatcatggaaggtacgggcgccttcgagaccattacccgtacccacgtgcgttttggcaccacctcgctgctggccaccaccatgacggcgccggtggaagaaatctcccgggtactcggtgagctcggcacgttctgcgaacagcggccagccggcagcgcccgcgtactcggcgtgcacctggaaggcccctacatcaatccgggaaaactcggcgcccaacccaacttcgcccacaccgcgttgatgcaggaagtggaagcctacctgcgcctggcgccgatccgggtgatcaccatcgccccggaaatcgccggccacgacgctctgatccgcgccctcagcgaacgcggcgtgcgcatgcagatcggccacaccctgggcagctatgaagaaggcgttgccgccctggccgctggcgccaccagcttcacccacttgtacaacgccatgagcccgctgcatcaccgcgaacccggcatcgtcggcgccgcgctggcccacgcccagtacgccgagctgatcccggacttgctgcatgtgcaccccggcgccatgcgcgtggcgttgcgctcgatcccctgcctgtactgcgtcaccgactccaccgccgccgccggtatgcccgatggcgaatacaagctgggcagccacaccgtgaccaaatgcctgggcggcgtgcgcctggccgacggcaccctggccggcagcaccctgaccatggatcaggcgctgcgcaacctggtgaaaatcggcctgccaatcagtgaagcctcacaacgcctgtcgcaatttcctgcggactacctgggcctggaagaacgcggccgcctgcaacccggcagctttgccgactgcgtgcgcctggaccgctccctgacactcaccgacgtaatggtcgaaggagacaccattgacttcaaaaatgcttgaagaggccctggcctcctgcgacgccgtcgcggcccaactgcaacgcctgaatcccatgctggaagaagtcgccgggcgcctgcgccgccagccaccgcaagtggcgatgaccatcgctcgcggcagctccgaccacgccgccagttacttcgcttacctggccatgcagcacgtgggcattcccgtggcgtcgctgccgatgtcggtggtgaccctgttgcaggcgccgatgaaagtcagcggccaggtagcgtttggtttctcccaatcggggcagagcccggatctggtcaatagcctgcgcctgttacgcaaacgtggcgccttgagcatctcgctggtcaacgccgaagactcgccactggaagccgcgtgcgaattccatgtgccgctgtgcgccgggccggaactcagcgtggccgccaccaaaagttttatcgccaccctcagcgccagtgcgcaactgatcggccactggaatcaggaagccgacttgctgcaagcctgtcaggccttgcccgagggcctgcgtgacgccgccagacaggattggcgcacggccatcgacgccctcaaagacagccagcgcttgatggtcatcggccgaggcgccgggtttgccatcgctcaggaagccgcgctcaagctcaaggaaacctcggcgatccaggccgaagccttcagcagcgccgaagtgcgccacgggccgatggcgctgatcgacgagaactaccccctgctggtgttcgccccacgcggcgccgagcaggccggcctgttgagcctggccgccgatatgcgccaacgcggtgcccgcgtgctgctggctgcgccggatgacatcgccgaacgcgacctgaccctgagccgcgctgaacacccaagcctggacccgatcctggcgatccagagtttctacgtgatggccgcaggccttgccgaggcgcgaggcatggacccggaccagccgcgtcacctgagcaaagtcacccgcacgcactaaagcggcgttttcctgatgagtaccgtgcccatgcccaacaacaataatccattgacccttagcgcccccttgagtgggccggtgctggccctgaaccgcgtccccgacgaagtgttcgccagcggcgccatgggcgacggtctcgctatcgacccgctgaacgattgcctgcaggcgccctgcgacggcgtgatcatccatgtcgcccgcaccgggcatgcgctgaccatccgcgccgacaacggtgccgaagtgctgatgcacgtgggcatcgacaccgtggagctcaatggcgaaggctttgctttgctagtgaaggatggcgcacgggtgagcgagggccagccgttggtgcagtttgacctggatcgtattgcgcgccagtgcaaaagcctggtgagcctgatcatcctgaccaacagtgaccgcttcgagctgcaacccatcgcgagcaagaccgtgaaggtcggtgaagcgctgatgcgcattgccctgcgcacatccgcgccggtgaaaaccgctgtggataactcggtcgcagaagtgagcgccacggtacgcattacccaccgtggcggcttgcatgcgcgccctgccgcgctgatccgcaagactgcccagggcttcagcagccaatcgcagctgcacttcggtgataaaaccgcggcttgcgacagcctgatcggcctgatggggctgggtattggcgaaggtgacgaggtacgagtgacctgccgtggcaaggatggcgaggcggcgttacaggcattggtcgccgcgctgtccgtggcgatccacgcggagcatcacgcgccggtcgttgccacaccacgccgagcgaataccgaagccaatgtgctgcaaggcgtatgcgcggcaccgggcctggtatgtgggccattgttccgcctgacgggcatcgagctgccgcaagacagcggcaatcatagcgtcgacgaacaactgcaacgcctggatgccgcccttgaccaagtgcgcggcgaaatccgcaacacgctggaccaggcgcgccaacgcaagaatgtcgaagaagaagagatcttcgccgcccacctcgccctgctggaagacccggcattactcgacgcagccaccgctgccatcgaacaaggcagcgccgccacccacgcctggcgtgatgcgatccaggcccaatgcgccgtgctgctggccttgggcaagccgctgttcgccgagcgcgccaacgacctgcgcgacctgcaacaacgggtattgcgtgcgttgctgggtgaagcctggcacttcgaattgccggccggggcgattgtcagcgcccatgaactgacgccctcggacttgctgcaactgagcacgcaaaacgcagcgggcatctgcatggccgaaggcggcgcgacctcccatgtggccattttggcccgaggcaaaggcttgccctgtgtggtggcattgggcgatgaagtgctcgacgtgccccaaggccaacgggtggtgctcgacgccgccaatggccgcttggaactggcccccagcgacgcgcgccatgccgaagtgcaccagattcgcgaaacacaaaaactgcgtcgtaaagagcagcaggcccaagcccagcaagcggcgagtacccgcgatggcgtgaccatcgaaatcgccgccaatgtcgcctccagcagcgaagcccaactggcgttcgcaaacggcgccgatggcgtcggcctgctgcgcaccgaattcctgtttgtcgaccgtcgcaccgcgccggatgagcaggaacaacgccaggcttatcaggctgtgctagacgccatgggtgacaagtcggtgatcatccgcaccatcgatgtgggcggcgacaagcaactcgactacctgccgctgcccgtcgaggccaacccggtgctgggcctgcgcggcattcgcatggcccaggtacgcccggaactgctcgaccagcaactgcgtgccctgctgcaagtcgcgccgctggggcgttgccgcatcctgctgccgatggtcagcgaggtggatgaactgctgcagattcgccagcgcctggatgaactgtgcgtggagctggaactgacgcagcgccccgaactgggcgtgatgatcgaagtgcccgccgccgcgctcatggccgaaaagctcgccgagcatgcggactttttgtccatcggcaccaatgacctgtcccagtacaccctcgccatggaccgcgaccacgcaggcctggccgcccgtgtcgacgcgctgcacccggcgttgttgcggctgatcgcccaaacctgcgccggcgcagccaagcatggccgttgggttggcgtgtgcggcgcgctggcctccgacccgctggccacgccggtactggtcggcctgggcgtcaccgagctgtcggtaagcccgccgcagatcggagagatcaaggaccgcgttcgtcatctggacgcggcgcaatgccggcaactgagccaggcactgctcgacctgagcagcgctaaagccgttcgccaagcctgtcaacaccactggccgctgagctgaaaacaacaagaatagggagacacgccatgtaccaacactttatcgaaggcctgcaacgcctgggccgcgccctgatgctgccgatcgcgatcctgccgattgccggcctgttgctgcgcctgggcgacaccgacttgctcaacattgcggtgatgcacgatgccggccaggcgatcttcgccaacctggcgctgatcttcgccatcggcattgccgtggggtttgcccgtgacaacaacggcactgcgggcctggcaggggcgattggttacctggtgatgatctccacgctcaaggtgatggacaccaccatcaacatgggcatgctcgccggtatcgccagcggcttgatggccggcgggctgtacaaccgtttcaaggacatcaagttgccggagtacctggcgttcttcggtgggcgacgctttgtgccgattgtcaccggcttcagcgcggtgggcctgggcgtgatcttcggcctgatctggccgccgatccagcacggcatcaacagcttcggcgtactgctgatggaaagcggcagcctgggcgcgttcgtgtttggcgtgttcaaccgcctgctgatcgtcaccggcttgcaccacatccttaacaacatggcctggttcgtgttcggcagctttaccgacccggtgaccggcgcggtggtgaccggcgacctgacccgctactttgccggcgacccgaaaggcggccagttcatgaccggcatgttccccgtgatgctgttcggcctgccggctgcgtgcctggcgatgtaccgcaatgcgttgcctgagcggcgcaaagtgatgggcggcatcttcctgtcgatggcgctgacctcgttcctcaccggggtgaccgagccgattgaatttgctttcatgttcctggcgccgttcctctacttgctgcatgcgctgctgaccggcctgtcgatggccgtgaccaacatgctcaatatccacctgggctttaccttctccggtggttttatcgacatggtgctgggctggggcaagtccaccaatggttggctggtggtaccggtgggcttggcttactcggtgatctactacacggtgttcagctactgcatccgccgcttcaacctgaagacaccgggccgggaagatatccaggtggtgcaggctgaagcgatgagtgataaccagcgtgcgacggcttatatccaggcgttgggtggtgctgagaatctgctgagtgtgggtgcctgcaccacacggctgcggttggacatggtggatcgcaacaaggcggtggatgctgaactgaaagcactgggcgccatggctgtagtgcgcccgggtaacggcggcagtttgcaggtagtggttgggccaatggccgatagcattgctgatgagattcgcttggcgatgccggggtttgttgccgcaacgcctgtagcggttgcgcctgtggataagccggtggcggtgaatgtacacgaggccgaaaagtggctgaatgccctgggtggccgagagaatgtgcgccaactggaagcggtagcgatgacccggttgcgggtggagttgggggatgattcggtgctgtctgaagcggacctcactgcgctgggttgcaagggtgtgagccagctggatagcggggtttggcacttgttgattggtgacaaggctttaggtttgggtgaggctttggagcggttggttacccgccctatcaacgcctgaccgatcgttcccacgctctgcgtgggaatgccgccccggacgctctgcgtcccgccctgcgcaagggtgacgcagagcgtcacaggatgcattcccacgcggagcgtgggaacgatcaatgtgggagcgggcttgctcgcgaatgggttttaactggcgtcggaaggtttaagctcgggcacttcgttcaagtccaacacccgatccaccatgagctgaataccctccagcatccggcaaattgccaagacaacatcacgctgcgcgccagcgacttcaaacgccagctggctggttagcgcctgcagcgaagcgatgtcctgcgaggtattggcgagcaaggtttcgctatcgatactgcgtcgtacgctgaataactgatctgaagggggattgggactgtctttgatcatggtaaacctctggtgtgaagtaagaactaccagcatcacttgcagatgatgggtggcagctgtgtgcgggcctgcaagaccgagagtcaccagcaagtctcggtagacccgaaggtctcccgcacacagccgccataaatggcgaccatgaaaaagcgccgcaattataaaggcgcttgtgactaactggtgaggtttcggcgggcttgcagtcccggtcgctgaattggcagcgactggcgaaggttagtggtacccgttccgagggacaacctgaaaggcttgtcggaaagttctgaggcgcctgcaccggcgccatcgcaggcaagccagctcccacagtgggttgatgcatgacaggacaacacgatcaaactgtgggagccggacttgcccgcgatgaggcccttgcaggcaacaaaaaacccgccgaccaaactggcccagcgggtttcttgtttatgcagccaacagatcaaaaatccgccaactgccacacctcatacgccggtgtctcatacgggtgactgagtttcaaagcagccacgacagccacaatcaactcatccgccaccaccaactcaaccttccactcttcaaccgcttcaacctggcccacctgcccgataaacggctggctgccgtccaacgcgcggaattggccctgacccagcacttgccaggcgcagctgtcgtagtcgccgatgcgcccgccgccggctgcgaagacggcggttttcaccgtctccacatggctgtcgggcacgaagaaggcgagcttgtacacggccttagttcacccacacacgggcgttgcggaacatgcgcatccaggcgccgtcttcgttccactcttccgggcgccacgagttttgcacggcgcggaacacgcgctccgggtgcggcatcatgatggtcacgcggccgtcgcggctggtaaggccggtgatcccgcgcggcgagccgttcgggttggccgggtagctctcggtgaccttgccgtggttgtcgacgaaacgcagggccacggtgccggacaggtcggcttcaagcagcgcttcttcgctgctgaattcggcgtggccttcaccgtgggcgatggcgattggcatacgcgaaccggccatgccctgcaggaagatcgagttggactcctgcacctgcaccatggcgacacgggcttcgaactgctcggaacggttacgcacaaagtgcggccagaactcgctgcccgggatcagttcgctgaggttggacatcatctggcaaccattgcacacacccagggtgaagctgtcgttgcgttcgaagaagccctggaacgcatcgcgggcacggctgttgaacagggccgacttggcccagccttcaccggcacccagcacgtcgccgtaggagaaaccaccgcaggccaccaggcctttgaactcattgaggtcaacgcgaccagcgaggatatcgctcatgtgcacgtcgatcgcattgaagccggcgcggtcgaacgcggccgccatttccacctggccgttgacgccctgctcacgcagcacggcaacctgtgggcggatgcccttcttgatgtaaggcgcggcgatgtcctggttgacgtcgaagctgagcatggtgctcaggcccgggttgtcttcctccaggatcacgtcgaattcctgctcggcgcagtcggcgttatcacgcaggcgttggatctggtagctggtctcggcccactggcgttgcagcaagcggcgctggccggtaaagaccgtgtcgccgttgaacgagatattgacttcgccgttgttgatcggctggccaatcaccgccacgcactcggccaggccagcggcgctgaactgcgcgagcacgtctggggtagcgtcctggcgcacctggatcaccgcacccaattcttcgttgaacaggatgccgttgatttcggcagcatcctcggcaacgctgtcgagcacgatgttcaggccgcagtgaccggcgaaggccatttcgacaacgctggtcagcaaaccaccgtcggaacggtcgtggtaagccagcaggtggccgtcggcattcaggccctggatcacggcaaagaaggctttgaggtcttcggcgtcatcgacgtccggggcctgcttgccgagcttgccgtgggtttgcgccaggatcgaggcgcccatgcggttctggccacggcccaggtcgatcaggatcaggtcggtggtgcccttgtccatgcgcagttgcggggtcagggtctggcggatgtcggtgaccggcgcaaaacccgtgacgatcaacgacagcggcgacgtgacgctcttgtcggtgccgtcttcgttccaacgggtggccatggacatggagtccttgcccaccggaatggtgatacccagttccgggcacagctccatgccgacggctttaaccgtgtcgtacaggcgcgcatcttcacccgggtggccggcagcggacatccagttggccgacagtttgatgtcggacagcttgccgatgcgcgaggcggcgatgttggtgagggtttcaccaatggccatgcggcccgacgccggagcgtccagcagggccagcggtgtgcgctcgcccatggccatggcttcaccggtgtacacatcgaagctggtggcggtgacggcaacgtcggccaccggcacctgccatgggccgaccatttggtcacgagccaccaggccggtgatggtgcgatcgccgatggtgatcaggaagcttttgctcgccacggccggatggtgcagcacgcgttcgatgctgttggccaggtccagcgtgcttgggtcgaaatcatcgcccagttcagcttcacggttggccgaacggtgcatgcgcggggccttgcccagcagcacttccaacggcatgtccacggggctgttgccaaagtggctgtcggtgactgtcagctgtggctcggcagtggcttcgccgaccacggcaaacgggcaacgctcgcgttcgcagatggcctggaagcgtgcgaagtcttcagggccaacggccagtacgtagcgttcctgggattcgttgctccagatttcgtgcggggccatgcccggctcgtcgtttggaatgttgcgcagttcgaaacggccaccacggtcgccgtcgttgaccagttccgggaaggcgttggacaaaccaccggcgccgacgtcgtggatgaagctgatcgggttcttgtcacccaactgccagcaacggtcgatgacttcctggcagcggcgctccatctcagggttttcgcgctgtacggaagcgaagtccaggtctgccgagctggtgccggtggccatggaagaagccgcgccgccgcccaggccgatcagcatcgccgggccgccgagcacgatcagcttggagccaaccagaatctcgcctttcttgacgtgttcttcacggatgttgcccatgccgccggccaacatgatcggcttgtggtaaccgcgcacttcatcgccacgcggggtggtgatggactgctcgaaggtccggaagtaaccggtgagcgccgggcgcccgaattcgttgttgaacgcggcgccgcccagcgggccttcgatcatgatgtccagcgcggtgacgatgcgctcaggcttgccgtacggcacttcccacggctgttcaaagcccgggatctgcaagttggatacggtgaaaccggtgaggcccgccttgggcttggcgccacggccggtagcaccttcatcgcggatttcaccgcccgaaccggtagctgcgcccgggaacggggcaatcgcggtcgggtggttgtgggtttcaaccttcatcaggatgtgcaccggctcctgcaccgcgccgtactggcgggtttccgggtccgggaagaaacggccggcgacggagccgacgatcaccgaggcgttgtccttataagccgacagaacgccttcgctgtgcatcacgtaggtgttcttgatcatgccgaacaggcttttctcttggctttggccgtcgatgtcccaactggcgttgaagatcttgtgacggcagtgctcggagttggcctgggcgaacatcatcagttcgatgtcgtgggggttgcgcttcaagccgttgaaggcgttgaccaggtagtcgatctcgtcttccgccagggccaggcccagctcggtgttggccttctcgagggcggcgcggccaccgcccagcacgtcaatggcggtgagcggcttcggctcggcgtggctgaacaggccggcagcctgttccagctggctgacgatgatctgggtcatgcggtcgtgcaggctgctggcgatcagctccgcctcggcgtcgctgaactggccggcgacgtagaaggcgatcccacgctccaggcgctggattttgtccaggccgcagttgcgggcgatgtcgctggccttgctcgaccagggcgagatggtgccgaaccgtggcagaaccaggaacaagcggccagtcggctcttgaacgggaacgcttgggccgtacttcagaaggcgtgccagcacttgctgttcgtcggcggtcaagacgccggttacgtcggcgaagtgagcaaattcagcgtacaggcctgtaacagctggaaccttctggctcagttgctcaaggagtttgctgtggcgaaaggcagaaagggcaggagcgccgcgcaggatcaacatcttcgggacagcctcgggaaggggtgtgctttgaggccgtgcattctagcgtaaaccttcgccaacggcacccgaaacgctaccggtggccgccgccgaacgtcagttggcacgctttgcctgggatcagggcgttatccagggcattgggcgcagttattttaaccgtcacaaacgctcaccaagccccgtttctgcgggctgcagcacagttttgcgctggctagcagacaagtgcgccgctgtcgagatatggcgccgtgagccgtttgcgtatactgcgcagatgttcttcccaactgtttcgcgcctgcgatgcgtcaaatggctcatcgccaccttgctcttcctgatgctcagtgcctgtgttgataaacccagcacactggagcgaatcaaggaggatggcgtattgcgggtggtcactcgcaacagtcccgctacgtatttccaggaccgtaacggtgaaaccggcttcgaatacgaactggtcaagcgctttgccgacgacctaggcgtgaagctggaaatcgagacggccgacaaccttgacgacctgttcaaccagttgagcaaacccaacggcccggtactcgctgccgccggcctggtgagtagcgaccagcgccagcagcaggtgcgcttctcccacccgtaccttgaagtcaccccgcagatcatctaccgcaacggccaatcgcgccccaccaacgccgccgacctggtgggcaagaagatcatggtgctcaagggcagcacccacgccgaacaactggcggcactgaaaaaacagaacccggcgattgaatacgaagaatccgacgccgttgaggtggtggatctgctgcgcatggtcgacgaagggcagatcgacctgaccctggtggactccaacgaagtggccatgaaccaggtgtacttccccaatgtgcgcgtggccttcgacctcggcaatgccagcaaccagagctgggcggtggcggccggtgaagacaacagcctgctcaacgagatcaacagttacctggacaaggtcgagaagaatggcaccctgcagcgtctgaaggatcgctactacgggcacgtcgatgtactcggctatgtcggcgcctatacctttgcccagcacctgcaacaacgcctgcccaagtacgagaaacactttcgcgcctatgccaaggccgagaaagtcgattggcggttgttggcagccattggttatcaggaatcgctgtggcaacccacggtcacgtccaagaccggcgtgcgtggcctgatgatgctgacccagaacactgcccaagccatgggcgtgtccaaccgcctggaccccaagcagagcatcatgggcggcgccaagtacctggccaggatcaaggatgagctggacgacaagatcgccgagcccgaccgcacctggttcgccctcgccgcctataacgtgggcaccggccacctggacgacgcgcgcatcctggcgaagaaagaaggcctgaacccgaacaagtggctggacgtgaagaagatgctgccacgcctgtcgcagaagcagtggtatagcaagacccgctacggctacgcccgcggcggcgagccggtgcattttgtggcgaacatccggcgttactacgacatcctcacctgggtgacccagccgcagctggagggtaaccaggtggtggaaggcaacctgcatgtgccgggtgtggacaagaccaagcctgcgcaagacaccccacaactctgattacgacagcccgcacactgcaaatccctgtgggagccgggcttgcccgcgatggcggcctgacagtcaaggtattcggcgcctgacacaccgctatcgcgggcaaccccggctcccacatctgatcatcgtcgccttataggccggtgagcagatgaaccacgccgcccggcagtaccatcactgcgggtacaccggcagccttcaacgccgactcatccaacccacccacctccttcaattgcacccgcacccgcgtgagcgccacgcgctgctgtgacgtgacgttgccctccccgcccaacgcacccagcacatcggccgacaacaggctcggagtcggcgcggtaaccgtctccgccaccaaatcaggcgtcagggctttccagaacgcccgctgcaatttctcgaacatgctcagtgctccacaacaggtgaggtttcaacggtggccgcgtggtacaggcgcagggcctcgcgtacttggtcggcttcttccaggcccagcacctggcgggcgatgatctggcagtcgtgcaggtccagctcgcgcacggtggccttgatggtggggatcagcggtacactgaccgacagctcatccacgcccaggccgatcaacaccggcaccgccatggtttcggacgccagcgcaccacacacgccgacccatttgccgtgggcatgggccgctttgacggtgatgtcgatcaggcgcagcaccgccgggtgaaaactgtcggcctggctggccaggcgcgggtggtcgcggtccatggccaaggtgtattgggtgaggtcgttggtgccgatggagaagaaatccacatggggcgcaaacacgtccgccatcaacgccgcgctcggcacttcgatcatgatgcccagcttgggcagttcgctcaggccaagcgcctgtgcttcctcttcgagcattttgcgcgccaggtgcagctccgacagcaggctgaccatcggcaacatgatatgcagccgcgccaagccggcgctggcaagaatcgcacgcaactgttcacgcaacagttcggggcgttccaggcacaggcgaataccgcgcaggccaaggaatgggttggtctcgctgtccatcggcacataggccaagggtttatcgccgcccacatccagggtacgcaccaccagattgcgctcggtgccgagggcgcgggcgatcgcgctgtaggtgtcggcctgctcctctgcgctcggcgcacggttgcgttccaggtagaggaactccgaacgcagcaggcccacgccttcaccgcccagggtcagggattgttccacttcctgcaacgaggcgacgttggctgtgacctcgacgtggtgaccgtcgcgggtgaccgctgcccgtgaggcctgcgccacctcacgctgcagccgcagcttttgctgttggcgcaccgcctgcagttgctcgatttcggccaggttcggctccagctgcagctcgcctttgtcggcattgagcaatacccgcttgccgttggccaaggccagtacttggctgggtacgccgcaaagggatggcaggccgagggcccgggcgaggatggccacgtggctggtagcgccaccggcgaccgtgacgaagcccagcactttgctggtgtccaggccggcggtttgtgagggtgtcagttgttcagcgaccaggatggcgcactccggcagctccatggaccgctctggcacgcccaggatcaacttgagcacgcgctggccgacgtcggccaagtccgccgcacgctcagccagcagcgctttgcccaagccttcaaaaagtttggcggtcgccaccgttgccgtattccaggcaaaggcggcactcttgccttcggccagcaggctatgggcttgttcaagcagggtcgggtcttcgagcagttcttggtgggcgcggaagatctcggcctgggcgctgccggccgccttggcctgcaacgcttgcaacgcctcgtttgcagcccgcaggccacgcgccaatgcggtacgttcgaaggtttctcccgcaccggcttcgggaatgtcgagcgtcggttcagccacctggaccacctggccgaacgccgagcccggcgacgcacagacgcctcgcaacacggacgccgaagacgccgacgcagcgggcttgctgattttctcgacggctaccggcagcgtctcgccacagccgtcgagcaacaacgccaccagcgcctggatcgccgcctcggcatcttcccccgccgcgctcacttgcacgctgtcgccctgggaggtctgcagcgccatgatcgccacaagcgacttggcattcgcgctcagggtttgcttgtgcagaaatatgcttgagctgaaccccttcgccgcctgagcaaacaccgccgcagggcgggcgtgcaagccgctggcgttgggcagggttactggcttggagaacagcgcattgccctcctcctcgtccacctctgcgggtatctgccccggtgagacctgcaacagtggctggccggactcgaccagcgcctgaccggccaccaacggcacaaacggctcgccgcttacaatgagcatcaacgtcagcaggctacgtgcattgagcgccacatagtcggcatcgaattcgatcagcggctgcccggcctccacccgctggccctcctcgaccagccgggtgaagccctggcccgccaggttcacagtgtccaggccaatatgcagcagcacttgcacaccgttatcggcggtgacgctgaccgcatggccgctgtcctgaatgttgctgatcaccccagccaacggcgcgcagagggtttgcgaggtggggtcgatgcacaggccatcgccaatcacgcggccagaaaataccgggtcgggcacctggtccagcgccagcaaaaccccggacaagggtgccagcagttccaggggttgagatgtgatcatgacttcacctgtttgtgttgttctttaaaaatcattgagtcgatgcaaggttgaggttgacgaaggtcagtgtgggagcgggcttgctcgcgaaagcggtgtatcaggcgacacattcactgactgacccactgcattcgcgagcaaccccgctcccacattagcccgcgtactccctcctgattacttccaccaatattcgacctgcacaccgacgttcgacccatgccgcgccgtgccataggcgccggtgtcggacaacgccgtgcccgccgccagctcattggccgcacgcttggccgctttgttccaggacgcataggtgtaatacaaccgcacctccggccgcgcccagaattcagggcctttgggcgaccaggtcggagcgaaggtaaatttgctcaatttgcgcgtaccgccggtggcatcgacttgatcgtgccccagctcagcaaccagtttgaattgctcgctgagcgcatacgccgggcgcacacccagggacatccagttctggtcctgacgccctgggcgcacatctttctggtacaccgcttcaacttgcccgccaaaacgcggagtcagttgccaatcaaagaactccaccgcgcggtaacttttgctgctcttgtccagcgcggtattgccggtgtagcccaggccggtgccggggccttcgccgtactgcagggcaaacttgttcttgccacccaggaaggctgcttgcacatgctgcgccgtcagcgcccagccgctgttggtgtcacgcccaccggccttggcgatgtagctcaagcccagttccagttcgccaccggggttggtcttgaaacctgcgacattgaagtcgtgacgggtggcgtattccttctggtacaggttgtccttgcgcgacagggcgtagctgtatttcaaaccgccgatcagcacgtcctcgatcccgccaccggtggcgctctggttccagtagtagaagtcggagatatggatatcgttacgcttgtagtaacgccgcccggcccacagcgaaccaccattgaggctgggcaggttggaccattgcgcatacatctgcggcatgcgcgccgagccgttgttttcaccctggaatttcagggcacgatcgtacttgttataaagggaagccatggcatcgacgctgagcaccgaaccgtcgtcgaaggtcagcaaatcctgacgcagttccagctcggcgtactgctcgcattcgttacccaggcggtatttggtttgcgcacccggcagttggaaacattgctgcttgccgctgcccgttgacgtacccacgccgctgcgcaaatacccggcaaactccagggcttgcgcgccaaaaggcaccgtgaggcaggaggcaataaggcccagctttattgttgttttcatgaagcgctccttttatttttattgttttttcttactgtcttgcgtgacgcgatcacctgtaggagcgagcttgctcgcgaagaatttgcagcctccacgcaacacctggaggggcgcgttttcgttggcgatcttcgcgagcgagctcgctcctacagggggtgtttcaacccgtcaggtgcagcacgaaggattcataggggcgtagcaccaccgtgctcatgcgcagcgggtagtcggggtagttgctgatcagcaggcgttgctcgtttgcggcgttgatcacgccttctggcagttggatctcgcatggcgatccatagaagttgttgagtaccaacaggcgctcgccatggccttcacgcaggtacgcccagacctggagatggtcttgcagcaacgggcggtaaacgccttgctgtatcagcggttcgcgacggcgcaagtcgatcagcctgcggtagtgatgcagcaccgaatccgggtcatccatctggctgttgacgttgatctgcgcagcattggcggggatgccgatccagggttcaccgcggctgaaccccgcattcgcttcggtgctccactgcatgggcgtacgcccgttgtcgcgggacttctgcatgatcgccgccatgcttgcggcttcggactcgcccgcatcgcgcttgagccggaagatgttcagggtttccacatcacggtactgcgagatgctgtcgaagccggggttggtcatgccaagctcttcgccctgatacacatacggcgtgccctgcagaaagtgcagcgccgtggcgagcatcttggccgagaccacgcggtattcgccgtcgtcaccaaaacgcgagaccacccgtggctggtcgtggttgcaccagaacagcgcgttccagccgccaccggcttgcatgcccatctgccagtcggaaaaaatctgcttgagttgaaggaaatcgaagtcggccttcacccacttttgcaggttcgggtaatcgactttcaggtggtggaaattgaaagtcatcgacagctctttcgacgctggattcgaatagcgaatgcaatgttccaggcgggtggaggacatctcgccgacgttgatcaggtcatggccttcaaagacttcacggtgcatttgctgcaagtattcatgcacgttcgggccgtcggtgtagaaacggcggccgtcactgttgtcctcggggaaatcggcgggcttggagatcaggttgatcacatccaggcggaacccacccacgcctttgtcgcgccagaaacgcatcatcttgaacacctcggcgcgcacctgggggttgtcccagttgaggtcggcctgggtgtggtcgaacaggtgcaggtagtactggccggtctgtgcttcgtattcccaggccgagccgccgaacttggattcccagttgttcggctggtcgcgccagatgtagaagtcgcggtaggggttgtcgaggctgctgcgcgcctgctggaaccattcgtgttcaatggaggtgtggttgaccacgatatcgagcatcagcttgatgccacgcttggcggcttcgctgatcagcagctcgcaatcggccatggtgccgtagctggggtcgattgcgtagtagtcgctgatgtcgtagccgttgtcgcgctggggcgagcgcaggaacggcgtgacccacaggcaatccacgcccagccacttgaggtagtcgagtttgtccacgatgcccaacaggtcaccggtggcgttacccgcgtggctgtggaagcttttggggtagatctggtagatcaccgagtgttgccaggtttgcatggtgggttccttcagtagagttgggtgctggcccttctggcctcatcgcaggcaagccagctcccacacttgaatgtgttcacacatcactgtgggagctggcttgcctgcgatagcgatcttcaggcgacccggtaaccaggccgaacgatcttcatgctcaacatgcacgtcagcgcaaacggcacgaccatcgccacgaccatgccgatcacgaacatcggaatcgcgcttggcacgatcgagataaacccgggcaacccaccgacaccgatggccgacgcctgtaccttgttcaacgacaggaagatgctgcccagcgccgagcccagcagcgcggcgtagaacggaaacttgaagcgcaggttcaccccgaacatcgcaggctcggtgatgccgaagtaagcggaaatcgccgaggtcgaggccatgcttttgtcccgcgcattgcgggtcatgtagaacaccccgagggcggcgctgccctgggccaggttggacatgacaatcatcggccagataaaggtgccgccctgggtggagataagctgcaggtcgaccgccaggaacatgtggtgcatgccggtgatcaccagcggcgcatagagcaggccgaaaatcgcgccgccgaccatgggggcgatctcgaacagggtcaccaggccttcggtgatcaggatgccaaggtgacgagtcaccgggccgatgatcgccagggccagcacaccagtgacaacgatggtggtgatcggcaccaccagcagttgaatggcattcggcacccgcgcccgcagccacttctcgatcacgctcatgacaaaggcggccatcaggatcggcaggatctgcccctggtaacccaccttctcgatctggaaccagccgaagatatcgaagtacggcaggctctggccgtcgaggccggcgaccgccttgccgtagttccaggcattgagcaggtccgggtgtaccaacatcaggcccagcacgatgccgaggatttcactgccgccgaaccgcttggccgccgaccagcccaccagcgccggcaggaacacgaaggaggtgttggccatcaggttgatcaggctccacaggccatccaggttcgggtaggcctccagcagcgtctggccttcgatgaacatgcccttggcgcccatcaggttgttcacgcccatcaacaggccggcgatgatcagcgcgggcaggatcggcatgaacacatcggagaacacccgcaccaggcgctgcatggggttggtcttgtcgccgccggctttcttgacgtcggcaatggtcgacgcggccaggccggtcagttcgcgcagggcggcgtagaccttctccacctcgccggggccgatcaccacttggaacaggccgccggtaaagaacgagcccttgaccaggtcgacctggttcagggcactgctgttgaccaggctagggtccttgagcgcaaggcgcaggcgggtcacgcaatgggcagcctgctcaaggttttcgcggcccccgaggttgtcgagaatctcgcgggcaatcgttgaatagtcgtggctcatgctcgttttccactgtgattgtttttatgggtggcagtcgttggcagcacgccgaggagggaaaagtactcgtctgtacgagttaaatcaacaactcgtctgtacgagttacacttttgtttatgcctgcgagctttctgtcagatttttccccggctcgtacctccgtccaatggacaaacaccacctctgccactatggttcctgccttgaacgcgcagtccaccttcataacgccgggcaagagccatcccatgagcaaatacaaccagatctatacggatctgcttgccagcatcaccaccgagcgcctgcagcgcggtacgcgccttccctccgaaaccgaactgatggacgcctaccaggccagccgtggcaccgtgcggcgcgccatcgagcagttgcaggaacgtggctttgcgcaaaagatccacggcaagggcacctttgtgttgtcgcccaacccgatcgagttccaactgggcggcatcgtcagcttccacgaaacccacgccgacctgggtgatgacgtacgcaccgaggtggtcgagttcacccagattccactggaaggctcactgctgcagcacatcgaggccgagcccggcaccctcattacgcgcatcaagcgggtacgccgcatcggtggcaaacgggtgatcctggacatcaaccacttcatcagtgacctgattcccggcctggatcacgacatcgccgagcagtcgatctacgcgtttatcgagcaaacgctgcagctgcagatcagctatgcgcagcgcaccatcgaagccttgccgcgcagcaaggacgaccaggcgcatctggatctggatgggcaaagccatgtgattgtggtgagcaaccagacgttcttgcaggatggaaggcagttcgagtacaccgagtcgcggcatacgttggataagttttatttttcggatgtggcacggcgctaaacccggctgctccctggggctcgcttaaacccggcccctcacgacaccgagatactcctggccaagcctgctgcccatgcgccggccatcttttcccccacggcttcgaactccgggtgggtacttcgatactcggatagctccgccatggcgcgactcatgccatcgtccactctggcgagcaattcgttacagcgcgcctgcgtcaaactgcacgaactgcgcccgaactgcacaagcatcttgcgctttggccacgccttcgaaccgccaagcaacagccccatgatgtcgttgccggcgtagaccgtagtggtcaccaggtcataaacgggggcaagccagacatcggcatcctcggcgcagttttcataaagcaagccgaagtttttcaggtgtgcatcaccgttctgaataccggccgagagcgccaccattatgaaaaagtcttcaagagccctggctacccggcttggcgtgacaaatgacctgatcagttttgcgcacccttgatagctgccgtcatattttttcccggttccccatcccgatagaacacacatatcctcaaatccgaggtaggcgttttcaccgatgtcgaaccgcttcactaccagaaacttcccgttatgactgagctggacctcaggcacctcaagaccacaatggtatgcggcacgcatgcagaaaaattcattggccgccaactgaggaacgtccgactcattgaacgcctttaccaaatgcgtggcgcccttgtgggtaagacgttcaatatcagcagccatatcgccaacatcgcgaaccagcactttcggctgaacgcccgacacccctgaataagcggcgtaggttttcagaagctcatcgaacaggtcttcagccccgtcgtacaccagcaggtcagccagcttgaccccaggcaacgacgcatcacccgcttgatgggcaacgctgatacgacccaattggtgcggacctacgatgcccaataaagcaaagtcatcaaaaccgcgcaccgatttgctgaaacgccgtacgagttcggccttgagatgcccttcaggaatgtgcatctcaaacaacgggtgaatgccgtactcccagttgtagctttccaggcgcaccggcatggtcaaggacactgcttgctcttgggccaccgtgtcgttatacgaaaaaatcgagtcacgctgattttcattacgtcgtccgagcgttccagcaggcacaccgttggtgccgatgtacaaccgatcacgttggctagtcatggacacctcctgccttcaattcatcgagagtcatgcgtcgaggattgggggtggcggtcaattcgtatcccaagccttcaagaatcgctgcgaccttgcgaatacctatttcagggatggtattgttttcgatccccgagatggtggcgcgactcatgccgtgccgctgtgctagctgactttgcgaaaggcctgcggactttcgcagggttttgatcagaattcctagatcctccatctatatcgcatcctatacaatgcaaaaactcataaattacaattttgcataatatacaatgcattttgtattgaacagcttccttgatgtacagaggatgagttcttctaacctactcgcctaacatgcaaaaaccccggcacatggccggggttctgttattcagtcctcacctgctatcgcaggatcattcccactctattattaacaagcaggtaaacgtcaggaaaagcggcgcttctggcgaggcaattagcacaggaccatgaaaaataccatttcacatctcagcgcatcattcattatctgtcgagggttatgccgtagcactcggaagtaactccccttaccgactcgcctaaccttcacaggcaccccttcgctttgcgaaacctcaatcacacgtagtgcctctcgcgtcctgacttgagcatcgaagggcaacccaatcaagaatggccgataacccgagcctacccatatccgtactgggctgatagtcaccaagcagtatccgcctgcggtacacctttggggtgcttctgacatccagtgatctggaagccctgagggctgcggcttgtgcctgaacaaccaatagtggcctaatagtatcttctcgccttctccccgctgggaaggcttctttcgacaaggactgttgcatgacctcccaaccgaccctgcaagtcgatccactgctcacggctaatctcgatgccctgttcagctccgtgatcgatgccgaccagcggcagctacagatgcccgctggcgctcggtccgaacgggagacactgaaagacaagcgcctccaggagctgctcgaccgctgccgcgaagaagccctgcaacaagtggtcggccccttcggattgaccccggcaatgttctcggacatcgatggtggcaacgtcaccacccagcacaatgctaaccaggatatctacgccaaggcatccgagcattatgaccgggaagccgactacgattacgctgccgcgaaaaagcagaagatgaaggatgcggtgaaggacggcacgatgaactcgcaaaccttcatcgacacctacaccaatgaaaatgaaccgaccaagcgcacggccaagtcaaatggcaagctggttatgaacgcagagctggatcacaccatccccctgaagcaagcacacaaggaaggcggctggatgcttactccggagcaacgcaaggcgctggcctcggaaaaagacaacctgcatttcaccacctttgaaaataaccgagaaaagagtgataccgccgcagagaccgcgctttctgccgaaaacggttatgacgaatccattaccaagccgctgatcgacaaggcccgcgccgccatcgaccagcatcagcccgataccaaagaccgcttgctctaccacggcaaggagttgggcattacaggcgcgaaggaattcggcaagacaggcctccgcagggcaatgggagtgctgttgttcgaggtggtcaacggcagcttcgtcgaagtgcataaggtggtcagccagcgtgacgatcagcagcccctgctcgaccgtgtgatggcagcagttgagcgtgtgctcaagcgcgttcagagcaagttcaaggccgccttcgaggccttcttcgaaggcggcctgcaaggccttgtaagcaacctgctgaccttcctaatcaacaacctcattaccacttcggccaaggtcgtgacggtcatccgcgaaggcatgcaggagctgttcaaggcacttaagttgctgctttggccgcccaaggagatgtccggcgccgacgtcatgcgcgccgtcagcaagagcctggccggcctgctgaccctcggtgccggcatgctcctggagcaatcgatgaacacgttcatcatcggcatcccggtgctcgcaccgctggccggcatgattgccccggtgctcacaggcctgatgaccggcctcgccaacgccctgctgatgtacgcgatcgactcgctgatcgattggatgctggataagggaaccgacttcatcaacgcgcagatcgataccctgcaagccacagccgaactgggcgagcgcatgatcgaacaggtagagctgcaattccggctgtcggcgcgctaccggatgatggcccagctcaatcagcgtatcgccgagcgcttcgaccaggcaaccgaggcctcccaagcctcggtgcagcacgcgcaaggcaccatggaagaacaggcttcgactatcgtcgccctatcccaggccatcgatagcaaaaaacagttcaacgaacgcctcggttcgttgcttcagcagttcaggaaggaaacataagggatgtccaaagtcattgcccaactcgccagcaccgtcccaagcgacgacctgctcgcccgtatcgacatcgccgaggtgtacgagaaattccacagcaccttcaaacgtctagacgatttcaagagggtgcgcgacgaacacgagcagcgtaacttcctaggccggctttttcatcgtggcgaactgaagaacgcccagctcgacgcccaggaagtgcaggcggaattctccaaaactctcgcccagttgatggtgatcagctcgctgcaggcgcagcaactgaccgaacagcaggggcaactggccgaccagcagaagaccttggatgccaaggccgaggaactggcacgacagaacacgcgcctcgaacagcaccaggccgtgatcaagcaccaggccgctggcttgcgccaatacgtcacagacctgttgaaagtccagggactgaccgacgaacacggcgagatgctgataagcatcgccaaagaagtgatggaaacccgggatcgtctgctggcggactttgacaatcgcatgcagcagatgcagcgggttctggaagaccagcagcagttgctccgggaaatcctcgatgagcaggcgagcactttggagcagcgcctcacgaagttgcagcaggcggtcgactcaaccctggaacaacgtctcacgattgtagagcgaggtctgctcgccgcactcgacgaacaacgccgtgaagccgccagccagaccgaacggctcgatgccgacttagcctttcaagagcagctgcgggacgagtatcaccgcgaccttgagcgccagctctcggaactgcgcgaagtgctggccgaacagagccaagcgctacttaacgaacgcagcgaacggcagcaggagcgggccgagcgtcaagtcgaggtacatgccctgcgcaacgaacagaagaacggcgaaacacgcttgcgccgtgagcaacgtcgcctcatggccggactgtgcggcttggcattggtgtgcgccggtgccctcgccgggttcaccttctggaacacgtcaaagcctgttttggccccggtagaaatccacgaatctaaaataccagcgtcatgagctgcttgttcggatcagcgactcaggcctgatcgtcactccaccagtttgcctcgattgcgaaaatgcaaaaacctgcccaaaggaaaggcattacatgaataaggtattgtgggtcaaattcgggtggtcagaatattatcgaggtggcgacatcgccggtaactttgcctggctaaatcagaacagaggcacggaaaacgaaggacgaggccatgaagcgtacaacttcatgccggatgtcgatgggacttactactgttatgttccccctcaaggaggcaactacgcgccttatcatgacgacccggaaggatggacggttgtatgtctggccaaaaatccggcaaccccaggtatacacgtggtcggctggtacgaaaatgcgactcttcatggtgagtggattgtccgcccaagcaacaccgaccagcgacagcaagtttccccccatcccgcttacgactggtcatattgcataaccagcgattccgcttacttcatcccgcccgaggagcgggttctgccgttctcggatccatccgtgaaacaggggaagtactcttttctggacggcccaaacgttacgaagaccgagaacaaagaaagagtgcaggctcggctcgagagcttaatgacgcgtttggccccagtcgcagtacacaaccccaatgaacacaccgtttttgacccagaactagatcaggccgaccctcttcggggatttggcagccctgaacaccgtaaagccgttgaggttgccgctgaggacgccgtgatagcgtattacatagcacaaggttacggctaccagcgtacaacacaccttccctgcgggtatgactttctcttcgcgcgcaaagagtcagagctacatgtcgaagttaagggtacggccggcacgacaccgcgctttttccttacccgtaacgagcacaacgcaggattaatgctcaacccagcctggaggttagccatggtgacgtcagcgctatctgatacgccgcaggtcaccgagtacaatcctcgccagctaaaagaggcgtttaatcttgagccttatgtttacatcgggacattcgcgccaaaacccgaaccttaatgtttaaccctgtaccgcgacaaaaaacaaaagcccgctgttacgcgggcgtttgtttattgcgaggaggggtcactcccactctattgttaacagtgggaaatatcatatttttcatgaggttaagctacaaaataaatttaacgccatgtgatataccatagcctttatggcaattgcgtgtgatctgtatcgctaagactccagccttcaacctgtctgaacgccttggtaatttgtcgcaataggatagctaactcggcagcgtcgccgttccggcgcacttcacaaagcaactcggcagcgtagtgcggatcggcgttaatctgctcggccatgaactcgtcatgtgttcgacttttcatctagtggcatcctgttagtagctaggcggtacagcgcgcgtgatagcctcttagaagcggcttggactttgggggccactaccaatcggcagcagccaccgacgttatcttgaggcgagcgtacaccaattacagcatagtcgggccaatcaggtgaatctgcgccgacccgcagtccgaatcgatgctactaccaaaacggagaaactacagttcgcagaaaacacacaaaagtggccttactagcagttcattaacctaagacaagctgacgcgaccccatacaattttaaaaaaaattaaccactcagatcactagagaaactaacgaatcataactccaatgcaaagacagacagttaataaaagctatgactcaaaatattcctacaacaaaagtagatcgctaaaacaagaaagtacagaaaaccattaaaaacttggccatgagaccttcaggaacgcattttaactatcagcatttcttccgcagtattgccaattattcgtcacctcgatcagagcagatagacagagttgcatcagaattgataggctcttagctaccttcagcaataactgcattggacccctgatcatggatgtgaaagccccctactccgaaaccctccttagcgttaacaaagagaaaggaatatcaaatgaggagagagacgggagatcgctgctaaaaaaattgcgacaacaaatgatgctggagatcacctttggcgaaaaacgagtgggaactagcaaagaaatttccgaatggatattaaaaagataccaagagaacgcttactctggagatatctgccaggcagttttatatttaaaagaagattatgtatcttcctcaaatgaattaccaacaatcaaagctgctcttgagcagctctacgcattagaacactatccgattcccgaattttttttcgtgtcaaccgattacgaaggtgaacctgtaggtttcctatttcaaagagaggctctcaaaggaggtgggagagtctattctgtgaccggctttaatctatgcggtggttatgaaaaagtttctaggtcggagtttcgcatcaaagaaacagaccctgagccttttgtttctctgatgcaaaacgatggctgggctcacgccagcaaaataacatttagcgaaaataattatatcgagttaatttttaaatgcctagcggcctacagcaattacaaacatccgagaattgataacaaatcgatagttgacactcgatctataaaaccgaaagataacgactacttggttcgacttatttgcaaagcgattcaaggtaaagttacctgcacacgtattagcctgccaatcaaccgtattaaaccgcgcgatattgattacgcactaaatattcctgaatctgacatacaggattttatgcgtagaatcgcagagtggggcgaaccacttgccgaaatcctgctgtacgaaaaagacggtcaacttataatggatgacgattatctggcctactgtgcatatagggctctgaaaatcgattcagttaaagcggtggtgataggtaattttgatgaatcagacattaaaatcctgaagaggggacgtggggagcttattccgccggtaatcgtggatagaacaccaaaaaaaatgccgcacgatagtttatctaagaatcatatgttagacgagagattatcttcgttgatgccaactcctaattcacgcgcacagatgaaaaggaaatttacgaatttttgccgtcttttaggacgtgattcgactcttgaaaaagatctacaaaacttcatcaagcataaccccgagatatttgactcacattttggacgaatgcacatggaagtccctataggaaacttcagggcagatatggttttgcaatatgagcagtcacatagacgggttttactagttgagctggaaaggcatgtagatcagattttcacaaaagataaccgcttgcgcagcaaagtgacccacgcaagccaacaagttgaggattggataggcgaaataagatcgggaaaaaataacattccagactggcttaaacgagaatatgtggttgaaggtgcagtagtgattggccgctcaaaaaacctaaccgtcagccaaaaagatacgttacgcgtaatcaataccaatcgaatcgtcaaaatcatgacttacgatgatctcctagaacagatgatgagattaatatcaatcttgtaatgcaagccatttacaaagatctaccaataaatccagtgtccattaccgcttgtagccttaagtggacactgtagaatttcccatcaataatcggtggaagaaaagtgcgccttaaaattaacccagcagatccagtgaatcctccaaccaagaagcattcaggtgattaattagaatttagccaatttataacagcctcgtggaactctgtgattaccctacgagaataatcaagcgtatcttccacactgatttttgtcggatatgttattagcccgccatgggcgatgctgttacgctgttccaacaagctatcaagccgaccaagacttacgttagaaatatccaaaccaatgatcttggcattcaattctgcgacgtttttattaacattggaatgagtcattaccaatgcatcaaaatctattaaatgatctacgggacttccaagccacgtcttcatcgcgccagtaaaatctgttagcacatcgaactttcctgctccctgttttttgggtggcgtaccaagagtcatcgtattgagtagcttttgtaagaaagatgcgagaaaaccttctttctgcaaccacagggcagcataaatatttgtataagagctaactttttgaccgggccgacaatgacgccgcagacaaattgaacaagcaattttaaaatatccttcccaagcggcgtaaataattggaatagacatcaggtaaagaaaaccatcatttccagtatttaagactatgcatcgcgaatgtatatcatctaatatttttaaatgtcgttcaagcgcctgtttggcctcaagttttgcgctgctcagccttaaatgaacagccataattaccccttagagaaccatttttttccgaacgctacccgcccgatcatcttcagtcgggcattcgagcctgctcctgttaactttatagcctcatcttgatcgtggagctccactattagtttgcgcatacgatcaacagaaactttcttacatttagacaaattcagatagatgccgacagccacaatatcgaaaagattcgggctaaacccccccgtaaacttcccatttttccgaaacctgaatgcctcaccatcaggataagcgttatagataaccttaaaaacgtcagtaacttttttcttttcattttcatcaaacttcatgccgcctgaagaaattgagtacatcacttcgtctagaaagtcctccagcttagccgtcgtaggtttatagttaccgaaagcaatgagccgaagaattgattcttggacacccatcgatgccctatcttttacagacattttcagcgcgtcacaaacaaactcagagtttgcaacggccattaactggtcagcgaatggcgactcagtaaggcgcgccgagcagttccgtatttcctgattagatagagttgtgcccgatcggttaagtcgagtaaaaacgttgaacttggccagcgggctagactcttttttaagtagtatcacctgcactcgcgcatatcttaatgttcgaagaagagtatcgggcattgtggctcgagaaagtttctctaagcccttcaaaataggcgcgtgagaaagtattgtcggaatattcaaatcgttctctacaggcgccccagcagctgaaaccttcgaagttaagcccttgatctcttcacagaaaaactttaccactgtactgaaacgttgcagaccatcaataacctcaaaggacccattctgtttttcagctaaaaagatcggcggcgtaggtatattcaacagcaaggactctatgtagcgcgtttgttggtcaacggtccaacgaaaccctcgctgataaagcggatcaatttcaacgtctccagctttgaattgattgataagctcactccacatttgtgtgtaagaatcaactacaacctcgtgccgctgctcttcgacctcatcaacaagattttttgtcacactatgatccttcactgagcgtatctatggataatttgcgagctctacagctttttaaaaattaaaacactttcttccgtgcgccttgctttggagtacttttttgaattggtattaatatcagacatggagcgattattggaaaaatcgcagcgctgctgagtttccaaattgaagtaactccccatctcctctacaatcaaggccaaatcgttaagaacttctttatagtaagagttttgaaccacaaacactaagtctgcaccaggcctgcatactctagaagcctcgccaatggatttatatagcgcgttgtagtattgaacgtgactcttgtaatagtaagtctttgaagcgtaagaagtatgattccgtaccttatccaaaaaactgatgcactcagccccccagcctgattcaggaatagggacactgggatctactgtagaagtcccaactagtgatcttcttaataccttatagtcatcgactgtcattctcagtagcgccaactctaaagaagtagccactgcataatcaattctggtgcaatatggaggagaagtaatgatagcgtcgacgctatcacattcaagttctagatttgtcgcatcccccatttgaacttcgacgcgactagcatcaggacttgaaaaaaaacgatcctgttcacacaagagtgatacttcttgaacaaacataaatttcactgtagataatttaatcgttttccggctacctgcgtcctttggaacttttagccatgttggattagtgccgacaagatctttaacgagccttctggctaaacgaaacaataccacgtaaaaaaaagctgcaattggtgaaacgctactattattgtcgcgaatagttaaattaagataagcagaatccgcgactaacagcttattgattttgctctcgatagatcttagatagaaagcagactgcggatcaaaccacttctcaagaggttctaagcaaactgtttttgatattgctctaggtacagactttactaaactatgtgctagcggcaacaaactaggaatatctagttttgatacaaaagatgctttggcaaccaaaaccattacaggatttagatcgatacctaccgttctatgaccttttttatagcttgccacgcttgtagtaccgctaccattccacggatccagaatcaagctgccgctaggtagagaaagtttatcgattatgctttcagcgaattgctcagaatagcctgcatagtaggggaacaagcgcccctctttctgattcgatttcgaggcattctgcttgggattcatgatctcgatcacgattagcctttcgagcaattcaaaagagcccatcttagcaccgatcgctcgcgcatggcttgcaagcaggagcaagctgtaccccaaaatgcatagagcattccgaggtccaggtatcgcttcgacatgcattttcacctgttttatgctcggaatggagcaattggtatccatcggcgacgctaaacgtgcatggcgtgatcgattcgagggaaagaggcgtttcaagccagctcctcgttctacaggaggaatctctgctctgaaaaaatttgccccatatcttccgcctccaagcgactgccgccacttacaagactccagcttttggctattcgctgcctgctacaccggcgaaaaatcaatcgaaccctctcccacttcccgctcgaattgaaggtaaaactcagcagcggcattaccggtattttttcattttcgctggtacacaattcgactcatgaggtccagaatctgcgattgcagaacacgaaaatttttcatcatttcctcaacatctaccggctgagcaccttgcccgcgcttctcagcgagccaaagcttcaaaagcccagcgacccgtccagtgtcgccgttaacctttgccaaatcagccacggctctcaggtcaacaaccgaccggattggtgtgttcaaaccaagtgcgcgaaggtagccggagcgagacatgccagcctcctctgccttctctgtgatcgtcgccttttcctcgtcagtaacccaaacctcgatgggcttaccgcgtcggcgagccggtgcctttttttgatgccacctgtcatggacgctccttttatcgctggtgttttttgccttagacacggtagtggctggcggcctcccagagcaagatacgttgagccgaaggcgaataagggggcagtggtggacgggtacgggcttgcccgtacccgtacaacacacatcttgccgtccgattcgacgctaatgtgtgcgtatctctgcgaaccactcagagcaaacctttctaagcatgtctacgcatatctacgctggattacgcatggagattatgcaattttttgcgcatacttgcgcaaccatgcttatgaggagcttgtgctgatgaagacaccaaaagaaggacctacgggcgcggggcgagtagcgtttttagcgcgcctcgatgaattccgtggcctcattcaagccggttggccggtgacggtcgtgtatgagaatcacggtggcgagaacactggtctgagctacagccagttcgcccgatacgtcggaaagtacatccgcaagccgaccaaacgcggaacccgacagcccacaactcctgacgaaatgccacttccgataacgccgcaggtaggacaaaagaaatccggtgcctccatagtgcaaactcctatgccgaagcgtcgacctgggttccagcatgacccaagcagcggcaacaatcgtgacgacctcatctagctttcaatgaacggctaagcctttcaagaactgcacacacgtcaagcgcccgctactgctaccagcaacaccaaatattcggcacatcgacaagtcgacgccaactgattgaaagctcatccagtcggctttttgaggcattcggtaaaatgtatcggcaccagtcgatatcttccatgtcaacctaattagccaatcattccatcgatgcaaccggcatatcggggcacgatcaggcacggatcaaagtgactgatagaggccgggttatgcatcaaaaaatcacagcgttcttcaccgaaaaaacgctgccagcaagatttattgcgcgcaaaaagaccgtttctgctggccggaaactcctttgccatgcggcctatggtgccaacatagcccgagctgcctttgttgggttggccgtatacatcgcccctttcccggcatacgccatctattgctctaactgctcgacgttctatcaacagatgttcgaatacgccgaacaggtgaacactgcgctgaataccgccgagcagttgcaaacgcagattcagcagtaccaaaacatggtcacgcagggcacgggcctgcccgattccatgtttggcagcatcgcggccgatttgaaaaacgtggtcagaatctacacccgctcgcaggcactgggccgccaaatccagaacatagactcgcagttcaacacggtcttcccgggcttcgagtcctacctaaatcaagccgcgaactcagcggaggtcccgacgcaaaatcactatctgaagtggtcacagcaagggcgtgacaacgtgaaaacagctatggaagcggcgaacctcaatacaggcgctttcgaatctgaagacgcgcagcttgccagcatggtttcccgttcccagtcggccgtggggcggatgcaagcgattcaggcgggcaacgaaatcgcctcgcagaacgtgcagcaactgcaaaagttgcgcgacctagtggccacgcagatcaacatgcagggcaactacatggctcagcagggcgaccggaaggccgctagcgaagcagccgagcagcgcttcgaagcgcgtaaaaacaactgggggccttccgaggatttctaatcatgttcatatctaaaaatctgatcgctgggttatgcatcgtctctgctcttagtggtgctgttctgtccggattcattgtttctatccacaccgattgcggggctgctgagcgttctatgcaatctgacacggataaaaactttgaagcacggaaaaacaactggggcccgtctgaggatttctaactatgcaacgctcaacatttctagcactcattagtgcaacacttttgctttcggccggtagcgcgctggcagcgggagatgtaactcaaagcaatgaaatgaacgggcttttgcggatgctctatcaagccgcaagtgaatggtcaccgcggctacagggatatgcagtcagattgctggcgtctctcgctctcatccaattggtttggacgttcatgcctttagttatgaagcaagctgacttaggcgaagttgtgggcgagctgatccgcttcttcatggtaattggctttttctacgcagtcattgagcattccgttccatgggcgacagccgtagtggacagtttccgagaggctgcgggcacagctagcggtttgggtcgtgcccttcagcctggtgatatgttcgcggtggccgtcaacttctcacgcaccatcgtggaaggaatttcacttttttctccgggtaaagcagtccttatcgcgcttgttggctgcttggttttactgtgcttcgcctttatcgcggcattcatgtttgtgacgcttgtagagtcgtacgtcatcatcaatgcctccgtgctgttcttcggtttcggtggttcgcaatggactcgcgattttgcaattgcaccactgcgcttcgttgttgccgttggtgccaagctattcgtcttaacactgatcgtaggaattattgtcacatcggccaagtcatggttagcggcttataccaatgacgaagcatccctgatgacattggcgggactggctctggtgtgcgcctacctgaccaagactattcccgacctgattggcgggatgatcagcggcacttcaatgggcggcggttcggccatcggcggaatggctgcggctggcgcagccggtgctgctgccgcagtcgccaccatcgccacggccggtgccgctgcgcccgccgccgctggcgcgcttagcgctgccggtagtggtgcaagtgctgcaggcgctgccggtagcggaggattggctggcgctatcaactccagctttgccggtgcggcaaactccggcatcggtgcaactgcttcaatgggtaacgccgcgtcctctggagtaggtgccagcactggcggcggcgcagtcatcaagggctctacatcagcagggtcgagcatagggggtagtaccgctaaaacgacgcctagcccagcccagcaacctaacagcggcgtgcagcaggccgccaagcaggctggaaaggcagtgcaagacaacgacgacaaagacaaacaacaagagacatcaaaaaggggtactgagggctcgggaaactccctttctcaagcggcagatggaggtgcgaaggtgctcggggtgatggcttcaatggctgtgcctggcatggagaatgcgcatggtctgtcccttggtgctggatcaatcccaccttcaaatagcgcgaccaattcggccgctccaaacagcggcggagagttagccgctaattccgagcagggggattccaacgtgatccgtccagcctcagacgcaagccctactaatggtcgcctagcctcgctgagtgtgccgggtacagcctccaacaacgaagaaacggagaaataatcatgatgagctttctgatgttcgctggattcgtagtattcgcctttacgttcgccattggcatgtgggcattcggccggtggctgcgaagcaaaggttacgggccgcagctagataagctggatcggcagtacacggcgttgcagcttcgcgttagcccgctagcaatgtcggcttcatatcgcatgtttgtcgggggaatcagctgcccctgctgggtagtaaaaacaatgctaatttatgccaccaagttttggcggacatccgagcgatgcaggaaaaaaagaagtcagagtcccctaaaaagtagtgaccattattcagtggcagagcctcgagtgctttcagggtttagaccaatgttaaccggtacctcaagcgtggtctgatcacgatcttttcgtaactttctatttcgcacacgtaaatatacgtgtgcgaaagataacaaaatttatcaaatcatgttttttcagccaaagaaacaacagatgaaggagcagcagaactgcgccaagattcactcatgtaatctgacagcatattttcgtcgtcactcaaaaattgacaattttcgccgtcaaatactttagtcaccgaaagcgtgtctttaaattttttatacttgatcgccgccaaatcaaatgcctgttccaatgtagaaacgcgataagctccacaagccaacttcatcacttcaaacaaaatcaaatccaaataatcatgtccattttcgacaagaccatgtatatatgacggcttagatccagagtgaacaattaaatttcgagtcctatatatcctacgtatctgccatcgtaatttttgttcgtgactgtcaagtgccttttgtattttctctggcgaagcgagcatttcagaaagagaaaacaagcgaaacctaagtaaatgaaaatcacctaactctgcataaagctctttgcgtagcgcctcattccccggcacacacagcagggctagaagcctctgagagatggaagagccacttcctccctcaaccttattgagaatttttttcgttgtccaccgcctccaaattattaaatcatgaccaagcctacttattagacgcttgatgtatgtcttcaataaaaacggcatcattgactctacaacatttgcaactttagctcctttcatgcttactggaatcaaagtttcaagcgaagtccaaagactaaccagttgattctccacgatatcacttgcaacactgataccgtgaaggtcggccacacgattgaacctatcaaagctagcgccatgtaaaccgatatttcttattagtcgattaagttcttttgaggccttctccgcaggcatatcaaaaggcttatccattgcacctttagtaagggtgacagccacgggtacatctttacagcactgggatactattactttgggttgccagctgatcttttctctatggtgaaacaatgtgaataagtcactcaactgatcaagcttggcggctgctcgctcctgaactgagaaaatatcaaatcccctcaaacttcctacctccacataaacatagccaggaggttttacaaattcattatttttggccacctgagcaatttcttcaggaagctcatttaacagcttcataccaaaagcttgaaccgaatcccttgccgtctctataagatcagaaacaacaaaataaacatcaaaattgtgagaatgcggatatatatcttttaagaacacctccagactgtcgagacctgttatctcagcgccatcaggagcaaagaaatactcttgagtagtttcatacaaaaatcttttactaacccccatattaaccaatgcagttaccgtattcttcaatacagtatcaatagctttcttttttgaggactttaccgcagccatcagcaaatcgaaactttcatgaagataacgatacggctctagactccgccctagaacctctagtttacgttttaactctgataacttaaagtcggtgtcagacacattagaaatgtactcactgacaccctgatcaagtaagtttttagctacagcatcataacttatactccacttaagctcttctaaaacatgttttaaattagtttcatctataagttccttttcaatatcccgaatcagtgccagagcctctttacaaagagaaggggcattgagactagcaggcttataggagtctagcgtgtagtcccacaaaagttcatctagtcgctgagcaaaaaatagtaatccttcggtatcttcactgattacccaccgtttaatatttttaaacctcatactccctcctggatgctaaaagcagatgctactttggtgataccaaaatggcatgatgccctcaaaaaggtcggctagctagtgacgttcaagcatgtgactggctgcggttctcgcggaaggtgcatcggaaatccctctagcggcttgctgtattactcccgcctgcgccggacaacgttaggggacccgctacgaatacacgagcacgtacaacccccgtgcacctatttctggacccgcccaaccgttcagaccacagctaatcaggagcgacgaacagtgctgaggcttcgccattagtaatacggacggaccttgaacacctatccaccccctccgatcaaaagtgaccaagacctgaattagggagaacggcgctgtcaaaatcccggagtcttcacttttagtaatacgcacggactctgaacagtctacgtactgtgcttaaggtagccggaaacggcaccgaccgagatgcccatttgcttcgcaatggctcgcacacttagcccttcgactctgagagattgagcttttacttgcttggcgttagccgcctcaagataagttcgacgatccacagcaccggcagcgcgcctacggacctcatgccgtttcctgtcgcgctctaaggccatccccgagctgatgatagtcttgagctgccgttgttcatctgtagttatcccgaacaggtttatcagggtttcattctttggtgtgtacagcggtggatagtccttgcctccgaaactgaccctttcccccgactcgtaggctttggctttgctgaacaacgtcatcagttctttggagcggctattccattgtggatctagctcgcgggacagcgctgaggcttcgtgatacatctgcttgctgttggtcgcgccggaaagtagcaggaagttcaagcgccaaaacagatgttgcatccggcagccttcgttgacaccgccgcgcagctcggcgagcttgcgcaggtcttcgaggcggtcccacgcaagctggcggccggaaaatccgcggagattgtcagctttaccgccaggcaccaaaaggaagggcttaggcttgcgtttgacccgctcggaatgctcctgccgctgttgctcgattgtccaacgggcagtaggtagcagggcctcggccagagactcgaagttgtagcggacgggctggccatcggtgtcgttcgtgacgtgaaccacgcggcagacttcgccgctcttgctgttgaccgtctcgatggttcgtagcacgcggcttgcgtctttggccatcggatcggcaccgacgtgtgccagccgatccactaggtagcgttggcacgcattccagcggggcaacgcctgacgcgggatagtgccgtcgagtagccattttgcttggatgccccggccgctgtagatcaataccgatggcgctggcaatccttcttctgtgcagaagtacagcacagacgtcgccagttggtcaggcgtgcgaccggcaagggctggtatgcggtaggtgtcaagatcggtgaataacagccccaaacgggcgaggttcacgactcgccgattagggcggatgaactctgcttgagacatccatgtgtcgcgggttttatccaccaaattgagaatggtgggcatgtccgctaaccggtgggaggactggcgtttttcgccacgcacgtcaaccagcagcgagaaaaacccgctcctgctgctgtcgtgatacatctgcgcctcgccgtgagaactgaacagcgcaagctgcgatatgggccctacgtcgggcccgattcgcactattcaggctccaactccgggtctgggagccgggcctgaacccttgcaagcatcaatccattcttctacctcagccaaatcccagaccaccttacgactgctgatcgcaatgcggcgaggaaatcgacctttgctttcaaagttgtaaatcgtgcgctcacacagcgggatcatcgctagaagcgtcttcttgtcgatgagcgttctgttcttcgatacgtgcataccttggcctctatcagtcacagcaaatgtgtgcctgatcgtgcccctatgtgccgcttgcttcgatggaataattggctaaaatggttgacatgaaaaattgctcagccatcgccatttggaagggatgcgacccaaccgtcgcagatgccatcagacgatttcgagattgctgggagccgtactccgcagcatcgaagcgttaccctatcgctcgccttgtggaagaactcatcgaccccgttgttgctacgtatacggcaacactcccgtcgcgctatctagggcacgtaccaggagccggtaccggcgtagcattcagtgagatcatgcgattggttggtgctgaagcaatggttcgcgtacagcgccgattgctaagagcttttgtcctaacagaagaccagcagtccaagagagatcagcgatttatcgccacactcgaaacgctgatagagctggtatgggcatgcaagcgcaagcaaccagcgaaaagaaatgttcgtggcttgaatggtcaacgcttaaaagttttttgcagattttgcggcacgcttgcagagctggccacattcgccgaatccggcggcgacgatggccaacgcggcatggatgaaaaactgcgcctcagcaacctttattgcgcggctcatcgccctaagttaccggatggcgaatggaatcctgcgtatagaaaagcgaaacgatctatagcgcaattcgacctagaattagccagagtcagccgccaatgcgcctcgagaggtactccgcaggcgaaatcgggtgacgagttggttgacagctacatacagagctacatgcttggccaaacgttaacgctagcagaggaagcagagttacgggacctcgcgcggcttatggtggactcaagattatctgatagaaaaaaacagatgctcatgctccaacggcttggtttcaatcaatcagcgattgcgcgcaggctgggtatcgaacgccaagcggtatccaaagcaattgcctcaatcccagagatattttggttgagtcagccacaccgatccggttagtagctcgctttagcgtcaaccaaaatacacaatcaatagcggttcacgcggccgaaccgggctcttaaatcaaaccttcgcacgtggtttttttagcgtccactcgtcaatcatatccgcccaatcctgcaacatcgcccgacgctgatcgcggtattcagctttgttgtaaacggcccgtacccccttctgctcgtgcgcaaggcacttctcaatccagtctgagttgtaacccgcctcatgcagcagcgtgctcgctgtgcgcctcaaatcatgcggtccgaacttgctcagcggctgcccttctttctgcgcaagccggtacgtgagcgtcagcacttgattgatagtcgcggtgctcataggcaaatcagaatcgtaccgagagggaaagacgtaatccgaaccaccggcaaacgtcttcagagcaatgaaaaaatccagcgcctgctgagataagaacaccaaatggggattgcgccgcttcatccgctctttcggaatggtccacagggcttcgctgaaattgatttcgttccaggtagcgttggtcaattcacttttgcgaaccatggtcagcaacagcagcttagcggcgactctcacggatgaggcagtgccgatgcggtccaggtactgatacatcaacgcgatttcgtcaggccctagagcgcgatcacgtggctcgaatttagcgatgcttgcaggacgcaccagatcagccggattctcaaccttctggccacgctctatcgcccatcggaatacctgcatcacaatctcgcgggagtgcacggccgtggctggagctccacgctccacaattgcatctgtcagcgttcgcagatcctcatgattgatttccaccagtttctgattaccgaagtgcggctttagctcgcgctcgtaaaccgatcggcgcatgtcccgggttgagtcagccatctgatacccacgcagccatttctcagcccacgcatcaaacgtctctgcccctttggtgcgtgccttggcacgggctttctctttggcaggtgacttacccgccgaaaccatctttttagcctcgcccaggcgatctctggcttccgcaagtgtgatgccacccacgccataacgaccgaacgtgatggtctcctgacggccattgattgagtagttgtaacgaaatgagatggaaccggcagcagtgacggccacgtacagcccgtcgcggtcattcaccttgtagagcttttcttgcggtttgaggttacgcagcttggtatcggtcagcatggcagttacggattccatggaaaaaataccatgttcagaaaagcactcatgcaccacgataaaacccaatgaaaacgggctgatgatgagatttgataccatgccctgccctgctagggcgacatggtatcgagcaccgaacatggcatttggctcagtcaatgccccttaccatgccatacaaacacggtgcttggcgatgcacaaagctgccagaatttgccagacccaaaaagccagaagcccgcaattacgcgggctccagggcattttttgctagatcgtgccgggcaatgccggacgcgggctcattcccactcaatcgtcgccggcggcttgctcgacacgtcataagtaacgcgcgaaataccttcgatctcattgataatccggccgctgaccgtctccagcagttcgtaaggcaggtgagcccaacgcgccgtcatgaagtcgatggtctctacggcacgcagcgcaacaacccatgcgtaacgacggccatcgcctacaacgccaaccgatttcaccggctggaacaccacgaacgcctggctgaccttgtggtaccagtcggccttgcgcagttcttcgatgaagatgtggtcggcacgacgcagcaggtcggcgtattcctttttcacttcaccgaggatacgcacgcccaggcccgggcctgggaatgggtggcggtagaccatgtcgtacggcaggcccagttccaggcccagacggcggacttcgtccttgaacagctcgcgcagcggttctaccagcttgaggttcatttcctcaggcaggccacccacgttgtggtgggacttgatcacgtgggccttgccgctcttggcgccggccgactcgatcacgtcggggtagatggtgccctgggcgaggtacttgatgttgtccagtttggtggactcggcatcgaatacgtcgatgaaggtacgaccgatgatcttgcgcttcttctccgggtcggactcgccggccaggttgttgaggaactggtcctcagcgttggcgcggatcaccttgacgcccatgttctcggcgaacatggccatcacttgctcaccttcgtgcaggcgcagcaggccgttgtcgacaaatacgcaggtcagctggtcgccgatggccttgtgcagcaaggccgccacaaccgaggagtcaacgccgccggacaggccgagcagcacgttgtcggtaccgacctgggcgcgcacttgggcgatggcgtcttcagcgattttagacggggtccacagggcttcacactcgcaaatgtcgaggatgaaacgcgacaggatgcgcccgccttgcttggtgtgggtcacttccgggtggaactgcacgccgtagtagcgacgctcgtcgctgaacatgccagcgatcgggcagctcggggtgctggccaggatgtggaagtcttccggcattttggtgaccttgtcaccgtggctcatccacacgtcgaggccgaacaggccgtcggcgtcgatgtggtcttcgatgccgtccagcaggcggctcttgccaaccacgtccacacgggcataaccgaattcacgcagctcggaaccttcaaccttgccgcccagttgctcggccatggtctgcatgccgtagcagatgccaaataccggcacgcccaggtcgaataccgcttgcgggcagcgcgggctgttggcttcgtgaacggactcggggccaccggcgagaatgacgcctttgggtgcgaattcgcggatcgcttcatcgtccatgtcgaacgggtgcagttcgcagtacacgccgatttcacgcacgcggcgggcgatcagttgggtgtactgggaaccgaagtcgaggatcaggatgcggtgggcgtgaatgtcgagggccatgaagtcagtctcgtctaatgaatcagaaacaactcggggctgaagaacagccccggttacttaacattttgctggaaggctcaacctacacggtagtttggcgcttccttggtgatctgcacgtcgtggacatgggattcagccatgccggcgccggtgattcgcacgaactctggcttggtgcgcatttcttcgatgttggcgctgccggtgtaacccatcgaggaacgcaggccgcccatcagttggtgaatgatcgcgctcagggtgcctttgtacggcacacggccttcgataccttccggtacgagcttctcggcgcctgccgaagagtcctggaagtaacggtcggaagagccttgcgcctgggacatggcgcccagcgaacccattccacggtaagccttgtacgaacggccctggaacagttcgatctcacctggcgcttcttcggtaccggcgaacatcgagcccatcatcacgcacgaggcgccggcaacgatggccttggacaggtcaccggagaaccggatgccaccgtcggcgatcaacggtacgcccgtgccttcaagggcagcggcgacgttggcgatggcgctgatttgcggcacgcccacaccggcaacgatgcgcgtggtgcagatggaacctgggccgataccgaccttgactgcatcggcgccagcttcggccaaggccttggcggcagcgccggtggcgatgttgccgccgatcacctgtacgtcagggaagttctgcttgacccaacgcacgcggtcgatcacgcctttggagtggccgtgagcggtgtcgaccaccaccacgtcaacaccggcagcaaccagggccgagacgcggtcaccggtgtctttaccggtaccaaccgcagcgccaacgcgcagacgaccttggtcatccttgctggccagcgggtaagccttggctttttcgatgtcgttgacggtcatcatgcctttgagggcgaatttgtcgtcgacgatcagcacgcgctcgatgcggtgcttgtgcagcagttcgcgcacatcgttcttgtcggcgccttccttgacggtgacgaggcgctctttaggcgtcatcacttcgcggacggtcacttcaaggcggttctcgaaacgcacgtcacgggaagtgacgatgccgaccaggtcgccatcgtgcagcaccgggacgccggagatgttgtgcatgcgagtgagttcgaacagatcacgcacggtggcgtcagcttcgatggtgatcggatctttcaccacaccggcttcgtaacgcttgaccttgcgcacttcggcagcttgctgctcgatggtcatgttcttgtggatgatgccgatgccgccttcctgagccatggcaatggccagacgggcttcggtgacggtgtccatggcagcggaaaccaggggaatattcagctcgatgccacgggttaggcgggtcttgagactgacttcgttaggaagcacctcggaataaccgggcactaggagaatgtcgtcgaatgtcagagcttcttggctgatacgcagcatcgcgggggctcccgagcgggaaaatggaagcgcgccattatatacatgcaccctgccgggctcaatgtaaaactctgacaaacttggtaatagtgatagatggtttaaagctcgactttgacccagctcaccttctggtccaaccaatcggcaaactcgtcgataaagctctgcttgaaacccgcctccgcccagttgttgaaaatgaagcccaggttggaaaacccgcactcctgcaagaataaaaagccattaatgtcgtcttcatgcccacacagcgggcaggtgaagttatcggtgtggccgggcatccagtcttccaggctttcgaacagcgcttctccgacctccttcaggcactccgggcaaccggcctcctcgagaaagcccttggccggggtatagatgcaacgcttatagatgatctccaagccattgaccggctcgttgaacggcaacgcctcgggatgcagcaccacggcgcgggcgccatcggccagggcgtagcccatacggttgccggtgcggccgcaagtggtgagctcttccttgatgatgttcttgcgcaccagccagcgcacaatcgcccgggcgcggggttcgtggacgggcaaggtggagattttcgggacaaggatgctttgggaattcatgggagtcctgcggtgtggctactggcgccatcgcgggcaagcccggctcccacagttgatcgcattccagtgtgnnnnnnnnnnnnnnnnnnnnnnnnnnnnnnnnnnnnnnnncccggctcccacatttggaacgcattccagtgtgggagccgggcttgcccgcgatgacgcccgggaggacggcagcttaatccctgaaaaaatcaggtcaagtactcacataccgcccgatcaacgcaataccactggccaataccaaccaggtcaccaaccgcacgaacgcctcacgagacagccgcatcgtcagcctgcgcccacaccacagccccagggccatcgctggcaacaggcaaaccgccaacatcaataacggccaatctgcataaaccccggcaatcaggaacagactcaaacgcacaaccgtgctgcaactgatcagcgcactttgcgtagcccgcgctgcgtccttgggcaaacggctattcagatagatcgcatataaaaagccgccactgccaaatagcgcaccaaacaggccacccacagtgcccatgggaatcgaccaccccgccgccagctgactgggccgtgctttcaccgccaggctgtaaatcgcgtaggcgctgataaacagccccatcaacaacagcagcaggtccgaatgcaggttgagcaaaaacaccacccccagggtgcagccgatggccatgcagggcagcaaccgcaacagttccggcttgttcacatcgcgccgcgtttgcagcaggccaccaaacgccgcgacaaagtccagaagcaccagcaacgggatgatcttcgacagcggcatgaatagaatcaggatcggccccgccaccagcgcggtgccaaacccggcaatgccgaacacgatgtaagccaccgccacacccaggccgatcaccagccaatccacaccgccgaacgaccactggctcatcaactccaccggactcatgacttattccttctagtgagatgccgttcactttagccatcggcaagtgttgcgactaatatcttcaaagctcactacctatctcaaaaaggcatgacttgtgatctccactcgccaactgcgttatttcgtcgaaatcaccgacagcggtagcttcagtgccgcggccgaacgcctgttcgtggcgcaatcggcgttgagccggcagatcaaggagctggaatcacaactgcaaaccccgctgttcgaacgcactgcacgccagccacggctgacggccgccggcgaagccttctacccacgggcgcgcaacctgctgagtgagttgctcaaggccagcgacctggcgacgcaagtgggccagggccaactcggcactctgcgcctgagccactcgagtaccgtgccgatgagcggcgcgctactgcaaggcatcagcacgtggctggagcgctgtccgggtgtgtcgatggatatcgtcaagctctcctccgaagcccaactggaggaaatcgccgaggggcgactggacgtcggcctgctgcggttgccggtgttgcgccagcgcgaaggcgtgcgcgtggtgccgttgtacaccgagccgttggcgctggcggtgccgacaggtcacccgttggcacgcagcgacgcagcggtggagttggcgcaactcaaggaccaagcgtttatctcgatcccccatcctcagcgcggcgggctgagttatctgtcggccgaattgtgcatgcgtgcaggttttttccccaaggcggcgcgggtgatgtcgcgcaagaccacgcagttgcaactgatccaggctggtttcggtattgccttgttaccaaaatccatgcaggacatcgccccgcccaacgtgcattttttgcccttggccgacccggactgccacagcaccgtagccctggcctgcgcgcaagcgccaaacgcgctggtggagcaattctgtcaaaccctgcacgaatgcctataaactgccgcccatgattaaagatccttttgcccgcttgggcctggaccgcgaagtcctgactgtcagccaactcaacggccgtgcgcgggtgttgctggaagacgtgttcaccaatatctgggtggaaggcgagatctccaacctcgcccgcccggcctccggccatgtgtacttcacgctcaaggacagtggcgcccaggtgcgttgcgcgctgtttcgcaataacgcggcgcgggtacgccaggcgttgaaggacggcctggcggtgaaggtgcgcggcaaggtctcgttgttcgagggccgtggcgattaccaactgatcctcgataccgtggagccggccggtgatggtgcgctgcgcctggcctttgatgcactgaaggaaaagctcagcgccgaaggcctgttcagtgccgaacgcaaagtggcgctgccggtgcatcctcggcgcatcggcattatcagctcacccaccggcgcggtgattcgcgacatcatcagcgtgttccgccgccgtgcgccgaacgttgaactgaccctgatccctaccgccgtgcaaggccgcgaagcaatcgcgcagattgtgcgggcgctgaaactcgccgacgcacgcggtttcgacgcgctgatcctggcccgtggcggtggctccctggaagacctctggtgtttcaacgaagaggcggtggctcgcgcaattgatgcctgtgttacccccatcgtcagtgccgtcggccatgaaaccgatgtatccatcagtgacttcgtggcggacgtgcgcgcccctaccccctccgccgccgccgagttgctggccccagacgccagccatctggtgcgccaagtagaaaatttgcagcgccgcctggtgatgctgatgcgcaaccgcctgagccacagccgcctgcgcctggaaggcatggcccgccgcttgcgtcaccctggtgagcgcttgcgccaacaggcccagcgcctggatgacctggacatgcgcttgcgccgtgcgtttgagcgcagcctcaatacccgtcgcgaacgcttgatccgcctggagacccgcctcgccggccagcacccgggccgtcaactggccctcttgcgccagcgcctggacagcctcgccgaacgcctgccccgcgccatgcgcgaaggtctcaaggcgcgacgcctgcaactgcagagccaggtgcagacattgcaggtggtcagccccctggcgaccctgggccgaggctatagcatcctgttggacgagcgcggccaggcgattcgcaatgccgcgcaaacccataccggccagcgcctcaccgcgcgcctgggcgaaggccaattgcaagtgcgggtggaagacaaccacctgacacccgtcaccctttcattattggattgatcgatgccacgcctactgagcctgttgatgctgttgtgcctcacgtttaacgcccacgccgacagctacatcacgcgaaccctgaacaaacccgtgcctggcggcgtggccgtcgtcgaactaggcccttcggccacggcgccaaaagccacctaccagggcaagccggtgctggtggtcaaggagcaggacaactggctggcgattgtcggcatcccgttgacggtcaagcctggcaacgagcgcatcagcagcggggggcgcaacctgccgtttatcgtcggctacaagaagtatccggaacaacgcatcaccttgaagaacaaaagccaggtcaaccccgacccggcccagctcaagcgcatcgaaggcgaattggcagtgcagctcaaggcttaccgcagcttcagcccgaatttgccgagcaatctggtgctggataaaccggtgaacgggccgctgtcgagcaagttcggggtgcgacgcttcttcaacggcgaagagcgcaacccgcactcgggcctggacttcgccgtaccggccggcacaccgatcaagacacccgccaatggcaaggtgattctggtcggcaattacttcttcaacggcaataccgtgtttgtcgaccatggccagggttttatcagcatgttctgccatatgtcgaagatcgatgtgagggtgggtcagcaactggtgcgcggtgcggtagtcggcaaagtaggctcgacaggccgggccactgggccgcatatgcactggaacgtcagcctgaacgatgcacgggtagatccggcgatttttatcggcgcgtttcaaccctgaataccgtggccgtgaggggcgtcagtgatttcctgcgctgacgcctgatctgccgcaggttcgctgcaatgcactgtgatcttcttacacttttgcgatgaaccatccgacacccgagactcactcaaccagcgatttacacggacgtaatgagcaggacctgagcattggagatccaattcccatgagactctttccatgtcccttaccccagcactgtcagagcgacattcgcaaaacctcttgacctcatctcacgcctcacccggtacccccccgaccagcccgcctacaccacccgcaactctgcaacaacctgcatcagtccccttgcccgccgccgccaattacgcccccgatcacccgcctactcccgcctcgtcaggtataaccccggcgaaaatgcgataccaacagttggtgaagcatttcaaacccagcaatgaaatacagttcaccactgaacacgcgatgctgactgaagacatgcaacgcctgcacagccagcaacccggcttcaaggcctttgtgcaggcgcaacttgaggaggcgttccccgcgatcaggccgctggataccgacatgctcagtttcaatcgctaccgcgtgggcgatggacgcgaatcactggcctcttcagaacccctgatgactgcgctggccaggatgatccgcgacatccaggccaacccgaatgcgttgatgcgcccggagcggggcataagcactcaattcactcatcgacgaaccattgccgacctggcggtaccggtctttaccgaaggcacactgcaatccattgctcgcagcattgccacgcaatacccgcaggcgcttgaagaatactggagcacaccgcggccggtggaaaatcagccgactctccagatgccgccgcaagagcaactgttgttcctgcacaaaaaacagctgtcgatcctcgcctcactgcgcctgagcgatggcaccctgagcgcgaccggcaaagacctgatcgactccgcattgcgctaccccaccctgcaagaccgagaaaaacgcttcaccgacggtgatcgctttggggtgtaccccgtcactgtggatgaccaaacggaacatggcgcgatgctgccaggggcctttctcatcacccgaaaagacggctcatatgctacgccgcccacctggccgaatgggcgcgcacttgcgctcaacgatgacaatggccccgtcgtgatgtacacgcccagcgaaggtttcgaggaattcgcaaccccggcccaggcgcgccaggctttggccagccgcctggaccagggcggtgtcgaggccaagttgctcctgcaaggcctgcccccggctctgcaaaaccggcccgatcctattagcggaaaagatctgatgtccagtgtcgagccatcggccggggatgtgttggcccaatccatcccctggatgctcaaacgccagcgggcagacattaatacccacctgagcacagcattggcgccaggcaaaaccgtcaaccctcttctcgacagtgccacattggaaggtatcgataatgcggccgattggtcgtacctcatcgatggcaccaacgccatgctggcccgggacgacaaactgaccgacaaactccaacccgaatggttgaagaatctaagcccctttcaagaagccttgtttttgcacttggaaaaggcgcaggaacagagcctggatgcgctgacgcccctgcttgaaaaaatcccggcgctgaacaccttcgcccgtgatcgcctgaatgcagccatcaaacagcgatacccggcagcagaaatcgatgcggatcaactcatggtgcaggtccacacccgcaccgccatccacggtgggagagggactggccaacccctctattcgaaacaagacgcggtgtccctgaccgacttggcgctgaagaatcccagtggcttccctgccgtcgaaagaggtgtatacaccgatgagaaaatgaccttgcctctgcgcgacaagcacggcaagcctgtgcgagacctgagcggcaagccggttaccctggataccgacgatctcaaggcactggtcaataccaccgatgtcgggggcgaatacaccaaactgctcaaacagaaaatggccccagatgcccaatcggggaacgctgtgcacttgcgcacagcgtggaaagctcatctggcagacgcgatggacaaagaggcgtttctggcagaactcagccccgacgcctatacggaactggccagcgacaacatccataaacgcgcggcgcagtgggcggatgcggtactgactcaccccgacccggccacccgccctcaagtcgatgggaaaaccatcgtcgccaacagcctgctccacagggggctagcggtgcagggcgtaatggtgatcggcaaccagacagatccatcactggtgctgtacacccccaaggctcccgacggcattacttatcgcgaagtggcggatcacacggccctcaacaccctcctggagaaaaaagagtgggcaacctatatcgcgcaaagaaaatcaccggtcagtaaagatgagatcgatcagttcaagggagcgcttaaagaagttgcgtacaacccaacgaaattgatgtcccccgaactggtggtttcgtcggtcaagctgctgggaggcgccactcgccttgagcccataaaaggtgatttccaagaccatctgtacaagcaacacgtacagatggcgatcgaccgagcggatcaccagtccgtaagcagtgcgcaggtcgcacggcaatcgctcaagaacaaaatcgagttcggcattgaagtggcattgatctttactgacctgatacccgtggctggcaagggcgtgtctgcgggttttcgtctgggcaaagccggcatcagcgcactgcgtgccaacagcagagtgttgccacacctgatcaaaagacccggcctgggacgggcgatctacagtgatttcactctgtctgcgtcgggtatctccaatgttcgcgcggcccccatgcgcccggtattcaaatcgtcgacggccacaggcgcgattaccccgcgccctgggccaagagcactgcctgcgcccgtcagcccagtgccggcgcgccccttcgccagcaccggcaacactattgccggctcacgcacgcccaacgacgccgtcattccagagcgcgacttgagtgcgtacgccaggcctggcgacatgatcaacggtcggacgctcaggagtgacggtacctataacgttggcgacgagtggttcatccgatttaccgacagtacccgcgtgagcagggtttatcagatcgattcagcctttcacgctcgcagtggctgggtcaatatcatcgccccgaacgtcccatcaactgcgcccaaaagcagcaggatcgtcgcctctgtacaacatgcgggcaacggtgaatggcgcctgaatcaactgcccggtggagcccccacgccgacaccgggaacttcgacgacaggcgccggggcccctaccagaccagcgttaccagacgccgagtatttcagcctcaacagagggcggctggtcgaagccgacttcaccgctaaaaccttgcctgtggccaggtattggttcaggcgggatttgtataacttctacaagaacatgctcactcaaggccagatgccgccgcgcccgccccggctggagctcgcacccggcacctcgccggccgacctgttgcgtaaggcctacgaaatcactgatgtggtggtactgggcgagcgccataacgaaatcgccagtttccagatgctcaaagagaatatgcaggccctcaaagagtctggggttaccacactttatcttgagaatgtcgaaaccaatgccgcgggccagctcatggatgtgggcatgggggcccaccgtcctcaaggcgcgtctcccacgctctcggaactggttcaacttgccaatgacaatggaatcaccgtcaaatccctcgagcaccactacttgacccgccgatcggatatgcccgatttctataagtacgttggggacaacgacgaaggtattactcgcctacaagaattcaattacttcgcgagccgtatcttggaaacacgcaagccgggcgaaaaagtactcgccttggtaggccgggcccatatgaacacggcccgaaacgttccaggtctggcggaactcaatggaggggtgggcataggcgtgtaccccgacacaacattcaacaaaagtgttgccatcagcggcccatcaatcccgagagatcccggggctaacgtcacgaatagcctcacggtaggggattatcagatcttccataaagtcacttgagcaatcaccgtcgtgcgttgtttgcgcgatggtgagcctctcactgtcgcatgctgggacacgtgaaaacctcatgaccaaaattgcgccaccacctacagcagcgcaacaatgtgaagaacataagatattattagcaataaatatctataaagcttgttttacacagaaaatctatcaatttttcctggccaccttgccatctcacttggccacggttagggttgggcttatgaaaacctctcacaccctcattcagctccgccagcaccgcagcctgtgcctagtcagcgcacgactgccaggctgaatcgatctgcctcgtcctcaagttttatccccaataacagttctacggcaggccgccttttctcggcccctacaaccaaggatttcccgatgagcatgctcaaagacccgtcttcgaaataccgcgcgttcccgaccatcgacatcccggaccgtacctggccgtcgaagaccatcacccaagcgcctatctggtgcagctccgacctgcgtgatggcaaccagtcgctgatcgagccgatggacgcggtgaaaaagctgcgcttctggaagaccctggtggccgttggcgtgaaggaaatcgaagcttcgttcccggctgcttcgcaaaccgacttcgacttcgtgcgtaccctgatcgaagacaaccacatccccgaggacaccaccatccaggtgctgacccagggccgtgaagatttgatcgcacgcaccttcgaatccctgcgcggcgccaagaaagccattgtgcacttgtacaatgccacctcgccgtcgttccgccgcatcgtgttcaaccaggacaaggacggcatcaaggccatcgcggtcaacgcggccaagctgttcgtcaagtacgctgcccagcagccggaaacccagtggacgttcgaatactccccagagacgttcagcgccactgagctggaattcgccaaggaagtctgtgacgcagtgatcgaggtgtggaaccccacgcctgagcacaagatgatcctcaacctgcccgccacggttgaatgcgccacgccgaatatctatgccgaccagatcgagtggttcggtcgccatatcaaccgtcgcgacagcgtgattatcagcctgcacacccacaacgaccgtggcactggcgtggcggccaccgagctgggcctgatggccggtgccgaccgtgttgaaggctgcctgtttggcaacggcgagcgcaccggtaacgtcgatttggtcaccgtggcgctgaacatgtacacccagggcctggacccgcagttggacttctccgacatcgacggcgtacgcaaagtggtcgaggaatgtaaccagatccaggtgcacccacgtcacccatacgtcggcgacttggtacacaccgcgttctccggctcgcaccaggacgcgatccgtaaaggcttctcccagcagaaagacgatgccttgtgggaagtgccgtacttgccgatcgacccggccgatattggccgcagctacgaggcggtgatccgtgtgaacagccagtcgggtaaaggcggtatcgcctacctgctggagcaggaatacgacatcagcttgccgcgtcgcatgcagatcgagttcagccaggtggtacaggccgaaaccgaccgcgtgggcctggagatgaccgcaccacagatctatgccttgctgcagcgtgaatacctgcaagccaacacgccgtacgcgttggtcagccaccgcctgcaggaagagaatggcaacagctttgtcgaggtggaagtttccggcaaaggccagggcgaaaccaacctgcattggaagggcaaaggcaacggtgcgttggaagcgctggtagcgggcctgccgattggcgtggagatcatggactacaacgagcacgcgattggtgcgggtaccaatgccaaggcagcggcctatattgaactgcgcgtgaacggcgaacgcccggtgcatggtgtggggatcgatgaaaacatcactaccgccagcttcaaggcgctgttcagtgcgttgaaccgttcgttgagccagttggaagccaaagcggcgtaagcattgccgtaatgcaaaaggcccctgggtgagaatccaggggcctgatcgttcccacgctctgcgtgggaatgcagccctggacgctctgcgtccgcccttagaagcggtacgcagagcgtcccaagaggcgttcccacgcagagcgtgggaacaatctcagagccttagacaaactgaaaactatcggcatccaggttcgccgggaaccgcgtacggtaagccgccagctccgccgcatccaggatcacctggaacaccccatccgcctcacccgcactcagcaacgtctccccctgaaaatccagcacctggctatcgccggtgtaggcaaagcccttaccgtccgtgccgacccgattcaccgccgccacgtaacacaggttctcaatcgcccgcgccggcaacagccgattccaatgctgacgccgcgcacctggccagttggcggtgtacagcagcaggtccgtatcctgggcatcgcggctccacaccgggaagcgcaggtcatagcagatcagcggacgaatgcgccaacccttcaattcgaactgcacctggcgctcgcctggggtgtaatggtcatgttcaccggccatgcggaacaggtggcgcttgtcgtaatgcaacacctcgccatccggccgcgcccacagcaagcggttgcggtggctgccatcggcggcctggatgatcacactgccggtaatcacggcctgatactttgccgcttgggcctggagccaatgatgggtggggccgttttccggctcggcgaggctttctgattccatggaaaaccccgtggtgaacatctccggcagcacgatcaagtcggcgcctttggcctgctccagcagcaactcgaagtgttcgaaattggcctggcggtcatgccaggccaggcttgtctgcaccagggcaatgttcagattgggcaatgtactcagatcacgcatagtttttgcgccgcatgtcgcagcgtctcctcgcgcttggcaaagcacaggcgcaccaggcgctggccttggggtgggtgctggtagaacaccgaaaccggaatggtcgccacgccatgttcgcgggtcatccacagggacatggcgacgtcatccaggtctgggcgaatctgcgagtaatccaccagttggaagtaagtgccggtcacccgggtaaagctcaagcgcgatggcgccagcaggtcgcagaacaggtcccgcttggcctgatagaaggccggcagctcttcgacatgttccgggtgttcggccatgaagtccgccaaagcgtactgcaaaggggtcacgccgcagaagttgacatattgatgcaccttgcgcagttcggcgctaagggccggtggcgcgaccacgtagccggtcttccagccagtgacgtgataggtcttaccgaatgagctgaccacaaaggcgcgctgatacagttcctgatgggccaatacgctgacgtggggtacaccgtcgaatacgaggtgctcgtagacctcatcgctgaccagataaatatcacggtcgcggatcagttcggccaactggtccagctcggcgcggctgatcagtgcgccggtggggttatgtggcgagttgatgatgatcatgcgggtgcgcggtgacagcgccgccttgatcttctcgaagtccagggcaaaaccgtccaggctcagttgcacgtgcacgcaacgaccaccggccagctccaccgagggctcatagctgtcgtagctggggtcgaacacgatgacttcatcgccatgatgaatcaccgcctgaatcgcgcagaagatcgcctccgtggcaccaggggtgatggtcacctcgctgtcggcattgactgtggcgccataactgcgagcaatcttggcggccacctgctgacgcaacacgggcaagccggtcatgggcgcgtattggttgtgacccagagcgatatgcttgcccactgcgtcgagcaaaccttgcgggccattgaaatccgggaaaccttgggacaggttgagcgcgccagtttcagcggcgagttgtgacatggtggtgaaaatggtcgtgccgacgtttggcagcttactggtgatcatcaaaagcccctgcaggtgagccccaagttttaagctgcctattgcatcgggtcaaggcacaaacggtcgcgcacaaaaaagggctccaaaggagcccttttttgcagcgtgttgcttaccactcaaagctgccgttatttcttgtcacggcgcttcttgtcggccttcttgtggtgagtcatcaaacgacgcttcttgttcacctgacggtcggtcagtgtgttcttgttgccttcgtatgggttatcgccacccttgaactcgatacggatcggcgtaccgaccagcttcaagacacggcggtaggtgttttccaggtaacgcacatacgacttgggcaccttctcgatctggttaccgtggatcacgataatcggcgggttggcaccacccaagtgggcgtaacgcagtttgatccggcggttgttgaccatcggcggtgcgtgctcgcccaccgcgtcttccaggatctgggtgaggcggttggtcggccagcgggtgaccgcagacttgaacgagttctggacggacgcgtacaggttgcccacgccagtgccgtgcagtgccgagataaagtggatatcggcgaactcgacgaagaacaagcgacgttgcagctcgatcttgacgaaatcacgctcgctcggcgtcatgccgtcccacttgttgatcgcgatcaccagggcgcgaccggcttccagggcaaagcccagcaagttgaggtcgtggtctaccacgccttcgcgggcgtccatcacgaagatcaccacgttggcgtctttgatggcttgcagggttttgaccacggagaacttttcaacttcttcgtggatcttgccgcgcttgcgcacaccggccgtgtcgatcagcgtgtacttttcctcgttgcgttcgaacgggatgtagatgctgtcgcgggtagtaccgggctggtcgtagacgataacgcggtcttcaccgagcatacggttgaccagggtcgacttgccgacgttcggacggccaatgatggcgatcttgataccgtccttttcgctcggacccggaatgcgcttggcttcctcgccttcagcaacgatctcttcttcgccttcttcttcctcgacatcatccttggggaagtcgcgcagggcgatttccagcatctgggtgataccgcgaccgtgagcaccggcgaccgggatcgcgtcacccaggcccatcgggctgaattcggcacgggccgcctcaggatcgatgttatcgatcttgttggcgaccagataggaacgcttgttgcgcttgcgcaggtgctcgccaatcatctggtcggcagcggtgtagcccgcgcgggcgtccaccagaaacagcaccacatcggcttcttcgatagcgagcagcgactgctcggccatcttttcgtccatgccatgctcgtcaccggagataccaccggtgtcgacaataatgtaggagcgcccttgccactttgcctcaccgtattggcgatcacgggtcagaccggacaagtcgccgacaatggcgtcacgagtcctggtcaggcggttgaacaaggtggacttgccgacgttaggtcggcccaccagggcgattacgggaaccatgcggctctccacttcgttatttcagaaaatacaaaagccgctgcagggcagcggctggtgctcggggcggcatttgaaatgccacatgccctgctctggcactactactgtaggagcgagcttgctcgcgaaaaaaccgagaacgccgcgtttatccagaaaacccgcgttatcgttgacgtccttcgcgagcaagctcgctcctacacagagcattgaagcagggccgcctgggggttaccccaagcatagtcaaacctttacttgatggtcagggcttccagcttgccgccgttgccatacacataaagcatgttacccaccaccagcggacgcgcacgcaggccgtcgctgtcgatacgctggcgaccgacaaaacgaccgtccacctggctcagcaggtgcaggtagccttcgaagtcacccaccgccacgtagctggagaaaacttccggtgccgacagttgacggcgagccagggagtcattgctccacagtgcagtggtggaacgctcatcgacactttcaacggtgccggatgccaggctcacatagacgctgccaaacccttgggcgacacccgcataactggaagcatcacgctgccagttgatgcggccgctttgcaggtccagcgcggcaacacggccctggtaggtggcgacgtagatcgtttcacccgacagcagcaagccgccgtcgatgtccacaacgcgatccagttcggaacgaccttgtgggatagccacacgggtttcccaggccggcacgccgttctgggtattgagggcaaccactttaccggtcgacaggcctgcaaccgcgaggttgttggtcacaatcggaccactggtaccacgcagggtcaacaccgcaggggtgctgtcgtacaaccagcgttggtcgccggtggaggcatccaggccgatcacgcggtcgtcctgggtttgcaccacgacgatatcgccgttggtcgccggtgccgagagcacttcactggtcacgcgagcgcgccatttctcttcaccggtgctggagtccagcgcgaccacgtcacccttgagcgtaccgatcagcaccatgccgtagccgacgcccacaccgccggaaaccggcagttcgaggtctttcttccacttgacgtcgccgttcatgcgatccatggcaactacaacgccagtggaatcagtggccacgatgttgtcgccgtcaatcgccggctgcaacaggttatagaggtcgccctgcccatcaccaatggattggctccattgtttttgcaggaccacttcttccttgaagctggtcagctcggcaggcggcagttcttttttactgttgctgctgcaacccgcggccaaaacggccagagccagcaatgctgcatgtttccaacggatcacgtcacgcatcccctttggccaagtcgtcgagcttgatttgtaagccaccgaccgccgcttcatcagacagcgccgccttggctttttggtacgcagcatgggcttcgtcggtacgacccaattggaccaaaaggtcgcccttgagctcttcgcgagtggccacgaatgccttgtcagcatcgccgtcgagcagtttgagtgcttcgtcagccttgttctgtgccgccaatacctgtgccaggcgctgacgtgcgatttcacccagggtcgggttggtcggcttgtcggcgatggccttcagctcggtggccgcgtcatccagcttgccggtgtcgaccgcgactttcgcgacgaacaggctgccgtattgggcgtaggtgctaccgccgaattcgtttttcagcttgccggccaggtctgcaacctgcgcaggatcaggcttgccgtccggtgtgagggtagtttccagcaattgctgataaacgatcgaggcgccttgggactggttggcctgatacttggtccaggcttgccagccgaacaccaccactaaagccagcagaccgcccgtaaccaggggcttgccgttacgctgccaccagtccttgaactcggccagttgctcatcatcagtactcgacaccccaatactccttaatcgctaaattcggctgttcgacagcttcaaccctgcacgacgcaggtggccaagtgcgcagcgagcgcatcaaaggcaatgttctgttgttcgccctggccacgcaggggtttgaaacctaccacttgctgggccagctcgtcatcgccgaggatcagtgcgtacagcgcaccgctcttgtcggccttcttgaactggctcttgaagctaccagcgccggcattgacctgcaggcgcaggctcggcagttggtcacgtactttttcgctcaaggccagggccgccagttcggcagcctcgccgaaggcgcacaggtacacgtccacctggcgggaaatctcttgcgggacctgctccagggtttccagcagcaggatcagccgctcaatgcccatggcaaagcctacgcccgtggtcggcttgccgcccatttgctcgaccaagccgtcgtagcgaccaccggcacacacggtgccctgggcgccgagcttgtcggtgacccactcgaacacggtcttgctgtagtagtcgaggccacgcaccagcttggggttgatcacgtagggaataccggctgcatccaggcgagccttgaggccctcgaagtgcacgcgggactcgtcgtccaggtaatcggccattttcggcgcatcgaccagcacggcctgggtgtcggcgttcttggtatccaggacgcgcaacgggttggatttcagacggcgttggctgtcttcgtccagtttgtccaggtgggcggacaggtactcgaccagggcttcgcggtagcgcccacgggactcgctggtgcccaggctgttgagttcaagcttgaccgcatcacgaatgcccaactggccccataggcgccaggtcagcacgatcagctcggcgtcgatgtccgggccgtccaggttgaaaacttcgcacccgatctggtggaactggcgataacggcctttctgagggcgctcgtggcggaacatcgggccgatgtaccacagcttctgggtctggccaccaccggtgatgccatgttccagtacggcgcgcacgcacgcggcagtgccttccggacgcagggtcagggagtcgccgttgcggtcttcaaaggtgtacatctctttttcgacgatgtcggtcacttcaccgatggagcgcttgaacagttcggtgaactcgacgatcggcatgcggatctgcttgtaaccgtagttatccagcaggcgcgcgaccgtgctctcgaagtagcgccacagtggcgtctgctccggcaggatgtcgttcatgccacgaatggcttgcagagacttgctcacatcagatccttaaattcggtcaatcagccgcgagcgatcagcgctgcgtcagcggcgaccttctcggccgctttctcgcggatcagcttttccagctcatccaccagattgtcattcgttagcttctgcgacggcttgccgtcgatgtaaatcaggttcggtgtaccaccggtcaggcccacgtgggcctctttggcctcacccggcccgttgaccacacaaccgatcactgcgacatccagcggcaccagcaggtcttcgaggcgcaactccaggtcgttcatggttttcaccacgtcgaagttctgccgcgagcaactcgggcaggcgatgaagttgataccacgggaacgcaaacgcagggatttgagaatgtcgtagccgaccttcacttcctctacggggtctgccgcaagggagatgcggatagtatcgccaatcccttcggcgagcagcataccgagacccaccgcagatttcaccgtgcctgagcgcaaaccgcccgcttcagtgatacccaagtgcaacggttgcacgatttccttggccagcaggcgataggcttctacggccatgaacacgtcggaagcctttacgctgaccttgaagtcctggaaattcaggcgttcaaggtgttcaacgtggcgcagtgcagactcaacaagggccgcgggcgtgggctcgccgtattttttttgcaggtctttttccagggagccggcgttgacgccgatgcggattggaataccacgatcccgggcagcatcaaccacggcacgcacgcgatcttcacgcccgatgttgccggggttgatacgcaggcagtccacacccagttcggccacgcgcaatgcgatcttgtagtcgaagtgaatatcggcaaccagtggcaccttgaccaactgcttgatacgaccaaaggcctcggctgcgtccatgtccggaacggacacccgcacgatgtccacgccggcagcttccagacggttgatctgggccacggtggcggccacatcgttggtgtcgctgttggtcatgctctgcactgcgatgggggcatcgccacccaccggcaccgagccgacccagatcttgcgcgatacgcgacgtttgattggagattcgccgtgcatgactattgtcccaacttgaggcgagcagtctcgccactggtgaacggcgccacgtctacaggctggccgttgtaggccacttgcgcgccacgggcaaagcccagacgcagcgtcaaaggaggcttgccgccctggtcaagcgtatctcccttacgcttcaaaccgctgaacagcactttgccgttgccatcggtgacctgcgtccagcagtcagcgatgaaggtaatctgtacgcgcccatcaccggcgatcaacgcaggggtggtgggaggcgacatcgccggcgctgcgggtgcggctggcgcaggggtcgcaggagcaggtgtcggaaccaccggagcctgggccacgggtgctgccggagcggttggaaccgccggagccggcaccgcagccgtcacagccggggccgtgccagcgtctggcgcgggttgctcggcagtggccggcgcttgcggcgcggcttgcccttctaccacggcctggtcttccggctcgtccaacgggtgaatctgggtagtgccgtcggcgctttcgacttcgacatgttccatggcattgctggtcaggtctttgttgcgctgggaggtctggtcctgccaccagacaaaaccgccgccgaccacggcaatcagcaacaacaggctgacaattcgcaaaatcgtgtgggaaacccgcgttggctcctcgatacgccccaacccatggacattactgccctgggcgtcggtaccggtgaactggtcgaactcctggaccagcacggcctggtcgatacccagcaatttggcataggcgcggatatagccgcgggcaaaggtgtgcccaggcagcttgtcgaacgcgccggcttccagattggccagggaggtgctggtcaaattgagcttgagggccacttccgccagcgaccaaccattgctttcgcgggcctggcgcaaggtttcgcctgggttgacgcgattagctgctacatcttccgggtgcgcggctttcatcattgctccgacaggtattgctgatattccggcgtaccgggatagagtcgttcgagttgctggccaaaacgtgcggccgtgtcgtgttcttcatgaaccgtcgccaggcgcacaccgagcaatagactacgtgcattttgcccgctgagcaggctaaaacgctcgtaatagtcacgtgccggcacataatgcctgtcttcgtaagacaactcagccatttcgagcaatgcccgtggctggtgactgttcaaatgcagggctttttccagttgctggcgggcgctgtcgcgttggccgaggcgcatcgaggttacaccgaggttctcgaacacccgcgaacgctgcgggtagagagtatcggtggcggcttgctggaaataacgtgacgccaggtcataccgttgctgctcgaacaggaaactgccgtagttgttcagcagccgcgggtcggcaggacgggaggccagggccttgtgaaaatagcggtcggccagctcgggctcggcctgggcctgaaacaccagggccagcgcagcattggcatcagcatcatcggcgtccagctcaagggcctttttcaacggcaccttggcctgctcgctcatgccttggcgcaggtaccccaaacccagttgcacataggcaactcgcgcctcatcacggcctttatcagtgcgcaacgggctgtcatggcccgatgaaacgcaaccggccacgaggccggtaaacagtaaaagcagcgcaaggcgcaagggcatagagatcctctctcagattcgattcacagcgatttgcggcaaatcttcagcggcgttaagttcgcgcacggcgatataacgttcactgcggcgggtgcggtccatcacctgccctaccaattggccacacgcggcgtcgatgtcttcaccacgggtggttcgcacagtgacgttatagccggcctggtgcagttgatcctggaaacgacggatggcgttgttgctcggccgctcgtagccagaatggggaaacgggttgaacgggatcaagttgatcttgcacggggtgtccttgagcaattcgatcatctcgaccgcgtgttccagcttgtcattgacgtccttgagcatggtgtactcaatggtcaacacacgcttttcacccagggtcgccatataacgctggcatgactcgagcagcatcttaagcggatacttcttgttgatcggcaccaattggttacgcaatgcgtcattaggtgcgtgcagcgacaacgcaagggagacgtcaatgtgcttggccagctcatcgatcatcggtaccacgccggaggtcgacagggtcacacggcgcttggagatgccgtagcccaggtcgtccatcatcaggtgcatggccgcaatcacgttgtcgaagttcagcagcggctcacccatgcccatcatcaccacgttggtgatggcacggtcgacggtcgccgggacgctgccaaaggatttgttggcaatccacacctggccgataacttcggcggcggtgaggttgctattgaagccttgcttgccggtggagcagaaactgcaatccagggcacagcctgcctgggacgaaacgcacaaagtgccacgtttgccctggggaatgtacacggtctcgacacagctgccggacgccacgcgcacgacccacttacgggtaccgtcgctggagatgtcctcgctgaccacttcgggaccacgcacctcggcaatggccttgagcttgtcgcgcagggccttgctgacgttcgtcatggcgtcgaaatcgtcgacgccaaagtggtgaatccacttcattacctgaccggcacggaaacgcttctccccgattgagtcgaagaatttctccatttccggctgagtcagacccagcaggttggttttaacagtcgatgtagtcatggattcaccctcactctttaagccgatgcttagcgagcggttacttcagtagcagcgaaaaagtacgagatttcgcgagcagcggcagcttcggagtccgagccgtgaacagcgttggcgtcgatggattcagcgaagtcagcacggatggtgccagcagccgcttctttagggttggtagcgcccatcagctcacggttcagagcgatagcgttttcgccttccagaacctgaacaacaacaggaccggagatcatgaaggcaaccaggtcgccgaagaagccacgagcgctgtgctcagcgtagaagccttcagcttcagccttggacagttgcttgagtttcgaagctacaaccttcaggccggctttttcgaaacgagtggtgatctcgccgatgacgttttttgcaacagcgtcaggcttgatgatggagaaagtacgttgaacagccatggtgtaactccagaaacggtaatttacgaaaaattaaacccgcgaattatacgcgggttattgggtattgcctaactgcgtaaaaaggcggctcagtctgcttcttcgatccacaggccttgaatcgcctcaaggaccttttcgccaccccggtcagggatgtcgtcaaaatccggcagtgccattacgaggtcgcgcagcttgacgaagttcaccgtaagaggattgacctcaggatgagcttcagcaagtcgtatagcgatttcttgtacatcaacccatttcaggctcatgacatttccttgaatcaatgcggcgcttcggctgcatggttgagcgaatatttcgggatttcgacggtgaggtcttcagtccccactttcgcctgacaactcaggcgcgacgtcggctccaggccccacgcccgatcaagatagtcttcttccaggtcgtcagcctcattgaggctgtcgaaacctttacgaatgatgcagtgacaggtggtgcaggcattcacgccgccacaagcactttcgatctcgatgtggttgtcatgggcgacgtcgagcagggacttgccggtctcagcctccacgaccatgccctcagggcaatgttcggcgtgcggtagaaaagtgacctgcggcatcagttattcctcaatttcattcaggttgcggcccgccagcgcggctttaaccgtctgatccatacggcgggcggcaaaggcatcagtcacttgcgacaggcgcttggtctgttgctcgatggcgtaaccatcgctgcctttcatcagttcggccagttcctgcatttgcaggtcaatgaccatgcgttcttcggcatcaagcaggcgctcaccgtcggcttcaagggcgccctgcaccgcttcgagcaggcgctgggcatccacttgctgctcgcgcaatacgcgggcgaccttgtcgtcaccggcatactggaacgaatccttgagcatcttggcgatttcgccatcggtgagaccgtaggacggcttcacctggatgctggcttcaaccccggacgccagttcgcgcgcggcaacactgagcaaaccatcggcatcgacctggaaggtcacgcgaatcttggcggcaccggccaccatcgccggaatgccgcgcaattcaaagcgcgccagggaacggcagtcgctgatcagctcgcgctcaccttgcagcacatgaatcatcatggctgtctggccgtctttgtaggtagtaaagtcctgggcacgggcgacggggatggtggtgttgcgcggaatcaccttctccatcaggccacccatggtttccaggcccagggacaacgggatcacgtcgagcaacagcaattcgccgccatcgcgcttgttacccgccagggtatcggcctggatggcagcgccgatggcgacgacttgatccgggtcgatttcggtcagcggttggcgcccaaaggcttcggcgaccgcttcgcgcacgcgcggcacgcgggtggaaccgccgaccatgaccactgcaccgacgtcttccaactcgataccggaatcacgcacagcacgacgacaggctttgaggctgcgggcgaccatcggctcgatcagcgcatcaaaggcttcgcgggtcagctgtgccgaccagtcaccgtaggacacttcaacagaagcagcgtcagtcagcgcctctttggccgcgcaggcagtttgcagcaggttgcgctgcgcgcctgggtccaggtcggccgacaagccggcactgctgatgatccagccagcaatagcgtgatcgaaatcatcgccacccagggcgctgtcgccgccggtcgcgagcacttcgaacacaccgccggtcaggcgcaggatcgaaatatcgaaggtgccgccgcccaggtcataaatagcgaccagaccttcagcgtgctgatcgaggccgtaggccaccgccgccgcagtcggttcgttgagcaagcgcagcacgttcaagccggcaagtttcgccgcatccttggtggcttggcgctgggcgtcatcgaaatacgccggaacagtgatcaccgcccctaccagctcaccgcccagggtgctttctgcacgctggcgcagcaccttgaggatatcagccgacacttccaccgggctcttgggcccctggacggtgtcgatgaacggcatatgggattcaccgccgacaaagcggtacggcagttggtcgcccaattgcttgacgtcggacaacccacgacccatcaagcgcttgaccgacaacaccgtgttcaaagggtctgcggacgcggccaatttggccgattcgcccacttcagtgcggtcggcgtgataacgcacggcggacggcaggatcacctgcccatcggcgtcaggcagtggctcggacaggccgctgcgcaaggcagcaaccagggaattggtggtgcccaggtcaatcccgaccgccaggcgacgctggtgcggttgagggctttggccgggttcggcgatttgcagtagagccatggtaatcaggtcttatctgtctatcaggcgtgcatcacgggcagcactgggttaatcgtcgaggcgctcttctagctggcgcacttcgtaggtgagcttgtcgaggaattgcatgcgccgcatcaggcgttcggcctgctcacgttgcgccgcatcatcccaacaggctgcgaagctttcattgagctcatcctgggccgccttcagacggcgcttgaagaccacgacacccgccacatcggcttcgtcctgcaagtcttcgagctcttcgcgccactgcatctgctgcatcaggaagtccgggtcatgcacggtgacttccatcggcaactcgccgcccgtcatcgccagtaaataacgtgcgcgtttcggggggctttttagcgtctgataggcttcgttgaggctggccgattgctccagcgccaagcgttgctcacgctcggaagcgtcggcaaagcggtccggatgcacgccacgcgccaattcacggtagcgcgtggcaagctgctcaaggtccagccgaaagctcggctgcagctcgaataaagcgaaatgacaaggagtacccacgagtagcctcagatgttgaagctttcgccgcagccacattcaccgcgcacgttagggttgttgaacttgaagccttcgttcaacccttccttgacgaaatcgagttcggtgccgtccaggtaggtcaggcttttggggtcgataatcactttctcgccgtgactttcgaacacctgatcctctgcaaccacctcgtcgacaaactccagcacgtaggcaaggccggaacagcccgtggtgcgtacacccagacgaatcccctcacctttaccgcgcccattcagggagcggcgaatgtgctgcgcagccgcttctgtcatgctgatagccatcgttgactccttactcgtcgccaaatgcttagatcaagcctttcttctgcttgtagtcgcgaacggccgccttgatggcgtcttccgcgagtaccgagcagtggattttcactggcggcagcgccagttcttcggccagctgggtgttgctgatggtgacagcctcatccaaggtcttgcctttcatccattcggtcgccaaggaactggaggcgatggccgaaccgcagccgtaagtcttgaatttggcgtcttcgataacaccagcatcgttgaccttgatctgcaggcgcatcacatcgccgcacgccggagcgccgaccatgccggtgccgacatcaggatcttccgcgttcatcttgccgacgttgcgcgggttttcgtagtggtcgatgaccttttcgctgtaagccatggtactgaatcctcactcatcagggccgctctggaaccctgtagaaacgcctgcgttttccgccacgttcctacagagcttgggtggcggcttctatagttagtgtgccgcccactcgatcttggaaatatcgacaccgtctttatacatgtcccacagtggcgacagaacgcgcagcttgttgacggcttcgcagaccttctgcgcggcgtagtcgacttgctcttcggtggtgaagcggccgaacgtaaagcggatcgagctgtgtgccagttcgtcgttgcggcccagggcgcgcagtacatacgaaggctcaagggacgccgaggtgcaggccgaaccggacgataccgccaggtccttgagcgccatgatcagcgactcgccttcgacgtagttgaagctcaaattcaggttgtgcggtacacgggcggtcatgctgccgttgatgtacagctcttcaaggttttcgacctgcttgtagaagcggtcactcagcgccttgatgcgcacgttttcggcagccatgtcttccttggctacacggaaggcttcgcccatgccgacgatctggtgggttgccagggtgcccgaacgcatgccgcgctcgtgaccgccgccgtgcatggtggcttcgatgcgcacgcgaggcttgcggcttacgtagagagcaccgatgcctttagggccgtaagtcttgtgggcagagaacgacatcaggtcgactttcagcttggacaggtcgatatcgaccttgccggtggactgagcagcgtcgacgtgcagcaacacacccttggagcgggtgagttcgccgatggcggcgatgtcattgatggtgccgatttcgttgttcacgtggatcaccgaaaccaggatggtgtcttcacgcatcgcagcttcgatcatggccggggtgacgataccgtcggtggtcggctcgaggtaggtgacctcgaaaccttcacgctccagttggcgcatggtgtccaggacagccttgtgctcaatcttggtggtgatcaggtgtttgcctttggtcgcgtagaaatgcgccgcgcccttgatagccaggttgtcggactcggtggcaccggaggtccagacgatttcgcgcgggtcggcattgaccaggtcagcgacttggcgacgagcgttctcgaccgcttcctcggctttccagccgaacacgtgggaacgggaggccgggttgccgaagtttccgtcgaccagcaggcattcgctcattttttgcgcgacacgcggatcaaccggggtggtcgctgagtaatcaaggtaaatcggcaatttcatggactttctcctaaatcaggctggctggcgtgccgttagctcttcggctgtcactcgacggcggacgcttcaatcttgtccagacgcggcgccttggtgttgcaacggcgctggtcctgacgctgggctacttcttgcacctcacggcgagtcacaagatcagccaagctgataccactcaaaaactcatggatctgcaggctcaagtcacaccacaagtggtgcgtcaggcaggtgtcgccggcatggcaatcacccaaaccctggcatttggtggcatcgacggattcgttgaccgcgtcgatcacctgagccacctgaatgccctgcatgtcgcgggacaactgatagccaccacccggaccgcgaacgctggaaaccagattgctacggcgcaatttggcgaacaactgctcgaggtaggacagggaaatgccttggcgctcggagatatcggccagggacaccggcccagtttgcgcgtgcaaggccaagtcgagcatggcggtcaccgcgtatcggccttttgtagtcagtctcatggacaagtaccaaggtgtttcagaatgggagcaagtatgcgattcccgagtatttaagtcaactataagacctagtactttagtcaggattacccgtaaaaagggcgcgcgaatcatagcaggatggggtcggatcgaacagcgcaaccaggcctgctgcaagaccactgagccaatggagatcaaatgtgggagctggcttgcctgcgatagctatctatcagctagcttataggttgctggcccgccgcaatcgcaggcaagccagctcccacagtggaccacgctcagcctgccttggtggtagcggtttcgtccttgatctcagcaaaatcctcttcgcgcagctcaggcaagtctttggcacagtacgggctgcccagctccttcagcgccccgcacataccctccagcttgccatccaccgcctgcagatgatcaagcaattgaccaatcgcacgagccaccgggtcgggcatgtcttcactgacgccataggcatcaaagccaatcttctcggccatggccttgcgcttggcctcttgctcatcaccgacttgtggcttgacgatgatccgacccggaatgcccacaaccgtggcacccggcggcacagccttggtcactaccgcgttggagccaaccttggcgccggcacccacggtaaacggcccgagcaccttggcgcccgcccctaccaccacgccatcgcccagcgttgggtggcgcttacccttgttccaggtggtgccgcccagggtcacgccttgatagagggtgacgtcatcgccgatctcagccgtttcgccaatcacaatgcccatgccgtgatcgataaagaaccggcgacccaccttggcacccggatggatctcgataccggtcaaccagcgcccgaagttcgataccagccgcgccagccatttccagcccatgccccacagggcgccggacaggcggtggatccagatcgcatgcatgcccgggtagcaggtcagcacttcaaaggcgttgcgcgccgccgggtcacggtggaaaacactttggatatcttctcgcaaacgctcgaacatttttaatccttccgcttaagaagctcaccacgggccgctttctgggtttccgtgaggatgccacgcaatatgttcatttcagcccggctcaccgagctgcggccgtacaagcgacgcaggcgcgccatcaagtgccgtggcttttcagggtcgaggaattcgatggcgaccagggtttgctccaggtgctcatagaaccgttccagctcgtccatggtggccaactcgccacttttggttgaggcaacctcttccttttccactttgctcggctggccggcagcagccagccaggccatgcgcacttcataagtcagcacctgcaccgccgccccgaggttcagcgaactgaactcagggtctgaggggatatgcacgtggtaatgacatcgctgcagctcttcgttggtaaggccggagtcttcacggccgaataccaaggcgatttcagcaccgccagcagcctcttccaccactttggtgccgcattcacgcggatccagcagcggccaagggatacgccgatcacgggcgctggtgccgagcaccagattgcagccgaccagggcttcctccaaggtggcgaccacctgggcattttcaagcaagtcattggcgccggacgcacgggcatcagcctcgtggtgcgggaatatccgcggttcgaccagcaccaggcgcgtcagccccatgtttttcatggctcgcgccaccccgccgatgttgccgggatgactggtattgaccaagacgacacgaatgttttgcagcaagggaggcgctctcggacacaggaaaggggagcaaatcttacagaaccgcctaaggttatgccatgaaagcgaacgtcgtccttcacctgaagaaagtttctgctagaatgctcggctttctttaacaaccttaggtgacctatccatgcagcccatgctgaatatcgcgctgcgcgccgcccgcagcgccagtgaattgattttccgctccatcgagcgcctggataccatcaaggtcgacgaaaaagacgccaaggattatgtatccgaggtggatcgcgccgccgaacagaaaatcatcgacgctctgcgtaaggcctaccctacccacggcatcctcggcgaagaaaccggcctgcacaaaggcagcggcgaaggcgaagactacctgtggatcatcgacccactggatggcaccaccaacttcctgcgcggcatcccgcactttgccgtgagcatcgcctgcaaataccgtggccgcctggaacacgccgttgtgctggacccggttcgccaggaagaattcaccgccagccgtggtcgtggtgcccagttgaacggccgccgcctgcgtgtcagcggccgcaccagcctggacggcgccctgctgggtaccggcttcccgttccgcgacgaccagatggacaacctggaaaactacctgggcatgttccgcgccctggttggccagaccgccggcatccgccgcgccggtgcagccagcctggacctggcgtatgtagccgccggtcgttttgatgcgttctgggagtcgggcctgtcagagtgggacatggctgctggcgccctgctgattcaggaagcgggcggcctggtgagcgacttcaccggtggtcatgacttcctggagaaaggccacgtcgtggctggcaacaccaaatgcttcaaggcagtactgacggcgatccagccgcacctgccggcttcgctgaagcgttaagcgagcgagcaaaaaaaagcaccccacggggtgctttttttatgcctgggatttagcaaaaaaccaattccaactgactcaatacaatccaatgtgggagctggcttgcctgctcccacatttggatcgaaaccagacctggggattactgctggttctgacccaggatcagacgaccttctttatccaccggaatctggctgccagggtcacgctccatacgcacggtaccttccttgccatccaggttgtaacgcacgtcataaccgaccaccttgtcactgatgtcgttaacggtattacagcgagtttgagtagtggtgtaggtatcgcggttctgcataccttcctgaaccttgttaccggcgtagccaccaccgactgcaccagccacggtggccagcttcttaccgttaccgccaccaatctggttgcccagcaggccacccgcaagggcgcccaccacggtaccggcgatttgatgttgatcctgcaccggacgctgccgggtcacagtgacgtccttgcagacctcacgaggggttttaatctgggttttcaccggctgcaccgccagcacttgcgcatactcagggccgctttttaccaggctgtaggtggcaacagcgcctccggcagtcacaccgacagcacccaataccgcaccaaccagcaacgacttgttcacatgaacctcctgaccatcacaagcggaccgaaagatccgcgctatacccagccttggagcaaaaaaaaaggcgcgagttcaatactcgcgcctttcttgtaacagcggatcaacaagcgcccatcaaggacggtcgtcgacctccttgtcggtagcggcaggagggatcaagtcttcgctgttgaggttcagccagatcagcaccacgttggcgatgtagatcgacgagtaggtacccgccagaacgccgataaacagcgccagggagaagccccacaggttgtcgccgccgaagatcatcagcgcagcaatcgccagcaaggtggagatcgacgtcgccatggtccgcagcagggtctgggtggtggagatgttgatgttctcgatcaacgtcgccttgcgcagtacacggaagttctcacgaactcggtcgaataccacgatggtgtcgttgagcgagtaaccaatgatcgccagcacagctgccaatacggtcaggtcgaaggtgatctggaagtaggccaggatacccacggtgacgaccacgtcgtggatcagcgacacaatggcgccgacaccgaacttccactgaaagcggaacgccaggtagatcatgatgccgaccagcgccatcagcatgccgaggccgccctggtcgcgcagttcttcacccacttgcgggccgacgaactcgacgcgcttgaccgacgcagggttatcgccgccgaccttttgcaaggcctcggctacctggtgacccagttgcgggtcttcgccaggcatacgcaccagcaggtcggtggtggcaccaaagctctgtaccacggcttcgtgatagccggccttgaccagctcgctgcgcaccagggtaacgtcggccggcttctcgtaggtcagctcgatgagcgtaccgccggtgaagtccaggccgtagttcagacccttatggaaccagctgaacaacgccagaacggtaaggagcacggtgacgccgaacgcaacgttgcgaacgcccatgaagttgattgtacgtaacatggcagccccttaaatccacaacttcttgaagtcacgcccgccaaagatcaggttgaccattgcgcgggtcaccatgatggccgtgaacatcgaggtaaagatcccgagggacatggtcaccgcaaagcctttcaccgggcctgtgcccatggcgaagagaatcccgccgaccaacagcgtggtcaggttggagtcgaggatcgcggtaaatgcccggccgaagccttcgttgattgcacgctgcacggtcatgccggcggcgatctcttcacgaatccgcgagaagatcagcacgttggcgtccaccgccatacccatggtgagtacgataccggcgatacctggcagggtcagtgtggcgcccagcaacgacataagcgccagcagcatcaccatgttgcccgccagggcgacagtcgcgatcacaccaaagaagcggtagatggcgatgatgaacagcgacacgaacaacatgccccacagcgccgcatcgacacccttggtgatgttgtcggcacccaggctcgggccaatggtacgctcttcagcgaagtacatcggtgcagccaggccaccggcacgcagcagcaacgccagctcggacgactcgccctggccgttcaggccagtgatacggaactgagcacccagcggcgactggatggtcgccaggctgatgatcttcttctcttccttgaaggtctgcaccggcacgtctttctcgacgccgttgaccatctgcttggtgtaggtggtcaccgggcgctgctcgatgaagatcactgccatgctgcgaccgacgttgctgcgcgtggcgcggctcatcagttcgccgccatggccatccaggcggatgttcacttcaggcgtaccgtgctcgccgaaaccggccttggcgtcggtcacctggtcaccggtgatgatcaaaccacgctcgatcaacgcaggaggacggttgccttcacggaattcgaactcttcggaagtggcacgcgtagcgcctggatctgccgcgagacggaactccaggttggcggtcttgccgaggatacgcttggcttcagcggtgtcctgtacgcccggcaactcaaccacgatacggttggcgccctggcgctgcacgatcggctcggccacacccagctcgttgacgcggttacgcaccgtggtcaagttctgcttgatggagtattcgcggatttcggcgatcttggccgggctcatcgccagacgcagtaccgcttgaccattgaggtcggcaggcacgatgtcgaaatcattgaagttcttgcggatcagcgcacgggcctgttcgcgggacgcttcgtcagcaaagcccagctgaatggcaccgttgagctgcggcaggctgcgatagcgcagcttctctttgcgcagcaggctcttcacgtcgccttcgtagactttcagacgtgcgtccagggccttgtccatgtcgacttccagcaggaagtgcacaccaccggacaagtccagacccagcttcatcgggtgcgcgccaatgctgcgcagccattgtggcgtggtctgggccaggttgagcgcgacaacgtagtcatcacccatggccttgcgtacgacatctttggccggcaattggtcttcttgcttggtgaggcgcaacaagccgcctttggaaccagctgccaaggttgccgctttaacctggatacccgcgtcgttgagcgctttgctcgcacggtccagatcagcctgattgacctgcagcgaagtgctggcgccagagatctggatcgccgggtcatcaggatagagattgggagcggaataaataaagccgatcgccagcaccgccaggatcagtacgtatttccacagagggtatttgttcagcatcacgccgcccgcttataacgcggggcgccttgcgcgccccgtcgattggtaaaggttgttacttagatcgctttgagcgtgcctttaggcagcgtggcggcgatggcgcccttctggaacttcatttccacggtgtcggagacttccagtaccacgaaagcatcggaaaccttggtgatcttgccggcgatgccgccagtggtcacgacttcgtcgcctttttgcaggctgcccagcaggtttttctgctctttggcgcgcttggcctgtggacgccagatcatcaggtagaagatgaccaggaagccgaccaggaaaatccactcgaaaccaccgcccatagggccggcagcagcaggcgcagcggcgtcagccatggcgttagagataaaaaagctcatttagcactccagttgcaaatagtgaatcttagggtcggaaaactcagtccaagggcggcacagggaggccacgcttggcatagaaggcatcgacgaaggcggccaatgtaccctgttgaatagcctcgcgcaaaccagccatcaggacttggtagtgacgcaaattgtggatggtattcaacatgctacccagcatttccccgcacttgtccagatggtgcagataagcacgggagaagttctggcaggtgtagcagtcacaggtaggatccagcggcgaatcatcatggcgatggaacgcgttacggatcttcagcacgcctgtatcgatgaacagatgcccattgcgggcattacgggttggcatcacgcaatcgaacatgtccacaccgcggcgcacaccctctacgagatcttccggtttgccaacgcccataaggtaacgaggtttgtctgcgggcatcaggcctggcagataatccagcaccttgatcatttcgtgcttgggctcgcccaccgacaaaccgccgatggccaggccgtcaaagccgatcttgtcgaggccttccaacgagcgtttgcgcaggctttcatgcatgccgccctggacaataccgaacagcgccgccgtgttatcgccatgggcgttcttcgaacgctgggcccagcgcagcgacaactccatggaaatacgcgccacttcttcatcagccgggtacggcgtgcactcgtcgaaaatcatcacgatgtccgaacccaggtcgcgctgtacctgcatcgactcttccgggcccatgaacactttggcgccgtcgaccggcgaggcgaaggtcacgccctcttccttgatcttgcgcatggcgcccaggctgaacacctggaaaccaccggagtcggtgaggatcgggccttgccacttcatgaagtcatgcaggtcgccatgcttcttgatcacttccgtgcccgggcgcagccacaggtggaaggtattgccgaggatgatttcggcgccagtggcgacgatgtcgcgcggcaacatgcccttgacggtgccgtaggtgccgaccggcatgaacgccggggtctccacggtgccgcgcgggaaggtcaggcgaccacgacgggctttgccgtcggtggccaacaattcaaacgacatacgactcatagttgttcctctgggccgcgcggcgccgggttacgggtgataaacatcgcatcaccgtagctgaaaaaacggtactcgttagcgatggcggcctggtaggcagccatggtttgcgggtaaccggcaaatgccgacaccagcatcaatagcgtggattcgggcaaatggaagttggtgaccaggcaatcgaccacatgaaaaggtcgccctggaaaaatgaagatatcggtgtcgccactgaacggtttgagcacgccatcacgtgctgcgctctccagcgaacgcacgctggtggtgcccacggccaccactcgaccgccccgcgccttgcacgccgccaccgcatccactacatcctggctgacttccagccattcgctgtgcatatggtggtcttcgatgttatccacacgtaccggctgaaacgtaccggcccccacatgcagggttacataggcggtgtcgacgcccttggcggcaatcgcatccagcagtggctggtcgaagtgcaacccggcggtcggggcggcgacggcgccgaggcgctgtgagtacacggtctgataacgctcgcggtccgcgtcttcgtcggggcggtctatataaggaggcaacggcatatggccgacacgctccaacagcggcaacacctcttcagcaaacttgagctcgaacaaggcatcgtggcgcgcgaccatctcggcttcgccaccgccctcgatcaggatgctcgaccccggtttgggcgacttgctggagcgcacatgggccagcacgcggtggctgtccagcacccgctccaccagaatttccagcttgccgccggaagccttctggccaaacagccgcgccggaatcacccgggtattgttgaaaaccatcagatcgcctgggcgcaaatgctcaagcaaatcagtgaattgacggtgtgcgagggcaccgctgggcccgtccagggtcagcagtcgactggcgcgacgctcggccaaagggtggcgagcgatcagcgaatcagggagctcaaaagtaaagtcagcaacgcgcatgatggggttcgtctagcagggccgggaagtctagcggaaatagtgaaaatagaccatgaaacgtgattgaccaacggtaatctcatctctatacttcgccgccattgagccctgatggcggaattggtagacgcggcggattcaaaatccgttttcgaaaggagtgggagttcgagtctccctcggggcaccatcttaaaaaaagaccttgaaattcaaggtcttttttttcgcctgcaaaaaagtgccaggcgtggcagtggagggagcgggaccatggagttgacgcttgaagcggttgcgttgtttgcattgaagctggtgcatgagactgacgacggtagcccgttgctgcgcgatgatcccgtgatggagggctatgatcgcgaggtgtttgggttgttggtgcgccagggaaacctggccgagatccaagtgaagctcgatgaatgcctgtatctggcactcgacaccctgggtggcgccgataccgtcatgggtcgcgagttgcagcggctcgcagcggacgtgcgcgaagcacagaccctggaaacactcgacgccccgctccacgcactcaaggattacctgaaagccatcctgtgacgtggactcacttgcgcccttccaccgccatccgcaccgccaagcccatcaataccgaccccatcagccagcgctgcagcacctgccaacccggccgggtgacgaagaacaccgcgatggaacccgccatgcaggcaatcaccgcgttgacgctcacgctgataagaatctgcagggagcccagcgccagggattgcaccagcacactgccatgaccgttcgggtcgatgaactggggcagcaacgacaaatacatcaccgccactttgggattgagcaagttggtgaccaagcccatggtcaccaacttgcgcgggctgtccttgggcaagtcgcgcacctggaatggcgagcgcccacccggcttgaccgcctgccaggccaggtacaccagatacaacgccccgccgagccgcagcgcgtcgtaggcaaacggcacagccatcaccaacgccgtgatacccagcgccgcgcacaccatatacaccacaaaccccagcgccaccccacccagggaaatcaacccggccgtgcgcccctggcagatggagcgggaaatgaggtagatcatgttcggccccggtgtcagtaccatgccgagtgaaatcaggccgtaggcgagcaagctggatatatcaggcatggattggctcctgttttttatgctaccagcgtgaaacccttcgccgacatggtcgtgttgagcgtcatgctaggggcttgaaggcccaggcgttagatacagatccgcaagcaaaacgtcatacaccggcggcaccccttacccaggacaggcacatgatcgacttcaacaacaaaggcttcttcaaactcaagcaaaacaacgaatacgccgaacgcgtagcagccctgctgctggacggcgaagaagtggtcgacgcctacaaggccatgcgcgacggcgtcgtgttcaccactaaacgcatcatcgcggttaacgtgcaggggattaccggcagcaagaaggacttcacctcattgccgtacaagaacatcgtggcgtactcggtggaaacttcagggtcgtttgacttggattcggagttggagatttatttttcgtcgttggggaaggtaaaatttgaattcaccggcaagacctcgatcgtggaaatctcccggctgatttccaagcacctgctgagttgatccgcaggcacaaaaaagaccttggtgcttcaaggtcttttttattgcggctcaactgatacacatcgctcaaaatgtgggagctggcttgcctgcgatgccctttaaggaaaaatcacagccgctgattcacttaatactcggacacattttcattcccgccacctactcaaacgcctgcaataccaaaccgccccactgaacgctgctcccaaaaccacaaccccattcccaaccaaccaaagcccaaaattcctgctctgatccgcatccccttgataaaacggcccaaaatacgcagacacgaccaccaccaaaccgttaaacactccgagcgccactacaaccaccccgacgacaaacaccacgcccttaatcaacttcatatgaccttccaaaaccagatctccctggactcgtgatagtccgagaacgtcccctcaatcgaaaaccccagctggatacgcggataactcagccaatccgtcaaccgccgtccattccaaaggtcaatgtggtcaccgctgcgattgccaaacgtctcattccctcggcgccaaaaaactttgaaaaagatataccttgagccgaacccagctcaatgtgggagcgggcttgctcgcgaatgctttgtatcagtcacctattcagtcaccggcccaccgctttcgcgagcaagcccgctcccacaaggggctgcgtttaactgacgggcatgaaggcaagccccccgcctctgatcgcgttgtgcccggtggtagccgtcagcctgggcgcctcacttgggctggaatgtcgctaagtacgccaggatattttcaatcttctcttggtcactgatcccccagaagatcatccgcgtgccactgaccaccgacttcgggtcttcaatgtaggccgccagtttttcccgcgtccacaccacgcccgagttcttcatcgcatccgaatactggtagtccgtggtggtaccggcaggccggccaatgatgccgttcagttccgggccaaaaccaccccgcgcaccctcaccaatgctgtggcagccgccgcaggtcttggagaagagtttgccgcccgcctcggcgtcgcccgcagcgagcgcgggggcagcgataacggtgagggcgagggtcaataacacatacttcattcaggtctccctatcggctgttgccttggattatgcctgttcgaccggcctttcccccagccgctgcaccaggcgcaccagataaccgttcgggtcttgcacgatgaactggcgttgcccggcctccacgtcaccggctcggtaccaggcgtcttctacattgcggaacaatggccagccgatttgcgccaaccgtagcaggataggctcgacggcgggcacatcgatttgcaggttgatgccgcgcccgaacggtggctgcaacggtgcggtcagccactggccggcatcggggtcgtattgttcgagcatgatttgcgcgccgtgcaggtcgaggtaggcaaagccttcttcagcgcgctgataggcaatggcgaagcctaactggtcgacccagaatgcgaggctggcgctgaggtgcgtgacgatcagttcaggcacgagtgggttacggttgaacatggcattccttggacgacagggtggcgttcaccttaacggattgtcgtgcccatggctcacaagtgaccaaacgaccacccatcgcttaaaaaacatccaatcgaacctatatacccaacccctactccaccttactgaaccccctgatggtggagtaaggatcatggctcagccatcgattttggtattggaagacgacgagatcattcgggcgttgatggtagatgtgctggaagactttggtgcggtggtgacatcgtttgcatcggcagacgaagggatgatttacctggagcgcggcgatgacccggtggatttgattgtcagtgatattcaaatgcccggcttgctcaatggttatgacttgagccgtgtggtcgcccaccgctggcctgaagtacaagtagtgctgacctcaggtaatacgaaaatcgccgccgagttgggcagttccgtgcggtttctgcccaagccctggagtaccgaccacttgcttgagtgcgtgcagacagcattgacgcactagggcctgcccctgcgtggatagcagcgcgatatcatttcaaccgaacttgagggccagttctgcggtcatgtaaggtgcagggagcgacttttctgatccgctggtcagccttttcgcttctgcgttcagctgacgacaatgagttgtgtagaatcgtcgcccattttcacgcgtcattcatggccgacaggcccacagttcgagctcattgaatgcattcacaggcccatgacgttagtgcgccctccttgttggaaacgttgcgcacgggcacgggcctgctgcatgtggcgttggaacagcgcctgccgtttttttccgagcgcctggatgcccagtggtatcggcgcctgctgcaagcgtactacggcttttatcagccgatggaagcggcgctgtatgacagcggtttgattcccgatggatatgagcctgtgttgcgtgtgaaaacgccaacactggtccatgacctgcacgcactcggcctgactgaccacgccatccatgccctgcctcgctgtacccaactccccgtattaaacacgccggctgcgtgtctcggcgccctgtatgtgctggaaggcgccaccctgggtggccaagtgctgcgccgggaaatggccctgcgcctggatgtgaacgccgacaacggcggtgcctttctcaatgtatacggcgccgagaccggacggcgctggaaagatttcctcgattatctgagccgccagccactggatacagatgccgccgcgcgcgcggtgatggcggcccgttcgacattcagcggctttgagcaatggctcgacagccaggaggtattgctatgaaacccgaagattttgaagagctgcttgccaactgcgccgacgaacccattcgttttccgggggccatccagccccacggcgtgctgctgactttgtcggaacctggcctgaacattattcaggtaagtgccaacgtcggtacgttgttcggccacgcccccgaggcgctgttggatcaaccgttgcacagattgattggcgaggagtacgcccaggccgtgcgaaccatggccgaggacagcgcattcctggactcgccgcccctgctgatcaccttcaagggtgagcagttcgaaggcctgttgcatcgccaccagggcgtgttagtgctggaattcgaaccacggctcaaggatttcaaaccccgagcgcacaatggccgcaccagcgatctgggcaagatgctgcaccgcctgcaatcggcaaagaccttggaggcgctctacgccatcaccgtcaacgaaatccaggccatgaccggttatgaccgggtgctcatctatcgcttcgaagaggaaggccatggccaggtgatcgcggaggcctcggcgccgtcaatggaattgttcaacgggctgttcttccccgcgtccgacatccccgagcaggctcgggagctgtatcgcaccaactggctacggatcatcccgaatgcgtcctacgaaccggtaccgctggtgcccaaattgcgcccggacaccgggcagcccctggacctgagcttcgccaccctgcgcagcgtgtcgccgattcactgccagtacatgcagaacatgggcgtgttgtcgtccatgagtatttcgttgatgaagggcgacaaactctggggcctgatcagctgcggcaaccgtgagccgctgctggtacctaatgacctgcgcatggcctgccagaccatcggccaggtgctgtcattgcagatcagtgccatggaggccctggagctgacccgccagcgcgacgagaaagtccaagcgctggcgctgctggacctggcgatgaaagcctctgccaataacgtcttcgacggcctggcccaacaaggccgaatgctgatggacctgaccctctccggcggcgtggcgatcatcgaagataaacaactgcaccgctacggcaattgcccggaaccggcgcagatacgcgcgctgcacaagtggttgcagggccacggcgcaccggtattttccagccataatctgacctcggtttatccgcctgccgccgagtatcagggcgtggccagcggtgtgcttgccatgagcttgcccaagcctgtggataacggcgtgttgtggtttcgcccggaagtcaaaaagaacatccactggagtggcgacccgaacaagccgctgaacctggaaacatccgacgcgggcatgcgccttcgcccacgcacctcgtttgaaatctggaaagtggaaatggctggtatctccaccaagtggagccatggcgacctgtttgccgccaacgatttgcgccgctcggccctggagaacgatctgtcccggcaggtgctgcgcgagcaacaagcggtacgggcgcgggacgaactggtggcggtggtttctcacgacctgcgtaacccgatgacggtcatctccatgctgtgcggcatgatgcaaaaagccttcagctccgatggcccacacacctcacgccgtatctcttccgcgatcgacaccatgcaacaggccgccgggcgcatgaatgtgttgctggaagacttgctcgacacctcgaagatcgaggccgggcgctatgtggtcaagccggtggcgctggacgtcagccagatctttgaagaggcgtattcgttgctggccccactggcctcggaaaaaggcatcgacctgtcgttcaatgtcgagcccggcctgcagatcaaggccgacccggagcgcttgttccaggtgctgtcgaacctgatcggcaatgcgatcaagttcacccctcgccaaggcaacatcggcatcagcgccatgagcaacggtgaggagattgtattttcggtgcgcgactccggtgaaggcattgcgccggacgatttgccccatgtgttcgatcgctattggacccagactgaaaacaaccccaccggcagcggactgggactgtatatcacacaggggattgtccaagcccatggtgggcgcatcgaggccgaaagtgagttggggtgcggtagtgagttcaggtttacggtgccaaagcccgcctgaaacgcgacctctctctaaacccaacatgcggatacctttggccgggaacgaacaatccggccaatgccactgaaacagtgcgcactcaaagggagtattgatgcggaaacaatcctccatttgagtaaggggttcaccatgatcatcagccacgccttttacacctattacgcccaccaaaacgcgcaaacccagcaggcggtcgtcaagccttcaccccacacaaacagccagaccgaaccgccaccgcggccaaggcgcccctccatggacgccctcggacagggccgactgacctgactaacatccgacgctgcactgcgttgacaaaacaccgacatccactgcgctactctttacgatctatttcgtgtgagccactccgtcgatgcttcaacccgacactttgcccgcggtcattgcgggccccctcctaaggcgcctggagccgcagcgcctggttatctggttggtgggcagccgtacgctgccaatgtccttgacgctgcaattaccctcgggcgaggcgctggatatcctgctcgatgcgacgcactgtcaagtcgtacccgtagggcgccatgcctttatccacctgatcgacgtagccctgagccacgccatgccgcaggacgaaatcatcggttacgacctgttgatcgacggcctcggcattgcacagtgggcaccgcacttgctgtatggcgacgcgactacgccaagcttcgtgctgcatagccgcatccatcacttggtgcatggctcgtgccgcaaaccccaccaccgtgccgacgaaggcttgctgtgtgtcgaccgtctgttggcggacgcccgcacaccgctcgaacgcccagccttgttgatgatgaatggcgaccagatctacgccgacgacgtcgcagggcccatgctgcgggccattcatgggctgattacgcgcctgggcctgttcgatgagtacctggagggcgcggtggtgagcgacagccccagcctttatgggcatcgcgccagctactaccaccgggccgacctgcttcccgcactggacagtaacgagaccttgcgcgaacgctttttcggcggcgtgaagaaaccaatcttcaccagcagcaccgccgacaatcacctggtgacctttgccgaagtgatcgcgatgtacctgctggcctggtcgccgacaccctgggcactgatcacgccagaaccgccgccgctgagcgcgcaagaacagcaacgctacgcccgcgaacaggttcatatcgaccagttccgcgacggcctgcctggggtggcgcgggtattcgcgcacctgtcaacgttgatgatgttcgacgatcacgacatcaccgacgactggaacctcagcgcccagtgggaagaaaccgcctacggccaccccttctccaagcgcatcatcggcaatgccttgctggcgtatctgctatgccaaggctggggcaaccagcctcaggtgtttggcgaactgctggaccagacccaggcactgaccggccaggtacaggccaatcatctcgacgcgacggcgcaagacgcgttgctggaggccttgctgaaattccagcagtggcactacgtattgcccaccaccccggcgctggtggtactcgacacccgcacccgacgctggcgcagcgaatttaccctcaagcaaccttccggcctgctggactgggaggccttgagcgagctgcaacaagccctactggatcacccttcagccatcattgtctcgcccgcgccggtctttggcgtcaagctgatcgagacggtgcaaaaggtcttcagttggtgcggttttcccctgctggtggacgcggagaactggatggcccaccgcggcgccgcacaggtgattctgaatatcttccgccactcgcgcacaccgggtaactacgtgatcctctccggcgatgtgcattactcgtttgtctaccaagtgctgatccgccaccgcaacggcggccccaagatctggcaaatcaccagcagcggcatcaagaacgagttcccgccgcgcttgctggaatggttcgaccgcctcaaccgctggctctactccccgcgttcgccgctcaactggtttacccgccggcgcaccatgcaggtggtgccctatattcccgagcacgccgaagcgggcgaacggctgtggaactcggcaggcattggccaggtgtttttcaatgagcagggccaaccgcaggccatttaccagcacaacgcggatggaaggcctcggacaaagatgatggcgccagaaaaatagcgtttcgccactcgtcaaaagcagcacacctgccctattcaaagcgcgcaagcgccgatgtacagtagcgccagccacggagtatcggcgtcaaccatgactggccttgggcgccagcccccgcaggaagcgcagatggacgatacatccggcaaagaaccgctacgcaatgaggtgtccgaccttaacgtcgacctgttgcacgccatcatggaactggtcagtgatggcatctgggactggaacgccaataccggcttcgtctaccgcaatcccggctggtacgaaatgcttggctactcccaccactccctggaaaacagcgtgttcacttgggagaacgtgatccaccccgaggattacccccgcgtgatggcggtgtttgatgactacatctgccaacgcgccgctcattaccgggccgaataccgttgccgaaaagaagacggtacgtacctctggatcgaggaccgtggctacgtcattgcccgtaaccccgacggttcagtggcgcgcatggtcggcgcacaccgcgatattcatacgcgcaaatgctccatcgaacagttgcaaaaacgcaaccagtctctggaagcgctggtcgcagagcgcacccttgagttgtcgcgcgtcaaccagcaactgcaattgcagctggacgaaaaccgctccctggccgagcgcgacgccctgacgcgcatcgccaaccggtaccgcctggaaaaagtgctgctggaggaatgcgaccgcgccgagcgcttccgcctgcccctggcactggtggccatggatgtcgatgacttcaagcccatcaatgaccaatacggccacggcgtcggcgaccagacgctgatacgggtagtggaacacctggaagcctgcgtacgtaaaagcgacttgctcgcgcgctggggcggcgatgaatttatggtggtgctgcccaaaagcaacttggacacggccaaagagctggccgaaaggattcgccataaaatcaaggcggcggcccccttgggcgcgttgaacgttaccctgagcctgagcgtagtagagcggcgcatgggggaatctccggcggcgctgatggcgcgggccgatcaagccttgtatcggtccaaggcggcgggcaaggatggggtgtcggaatagaccgcagctccttccaaggtggaatgacccggcaactttatttcgtttgcggcaaggccaggcgcgcggcttagatagcgctgcgcccaccactgccgagtccaagagtcatgagccacgctagcatcagccagtcgatttcaatcgttcaccccatcagcctgagccacggtaaaaacgcagaagtctgggacacggcgggtaaacgttatatcgactttgtcggcggtatcggcgtactcaacctgggccattgccacccggccgtggtggcggccatatgcgagcaagccacccggctcacccattacgcgttcaacgccgcaccgcatacgccctacatcgagttgatgcaacgtctcagcgcttttatcccggtggaatacccggtcagcggcatgctcaccaacagcggcgccgaggcggccgaaaacgccctgaagatcgcccgtggtgccaccgggcgcacggcggtgatcgcctttgacggcgctttccacgggcgcactctggcgaccctcaacctcaacggcaaggtcgcgccctacaagcagaaggtcggtgtactgcccggccctgtgtatcacctgccctaccccagtaccgataacggcgtgacctgcgccgaagcgctgaaggctatggagcgtctgttcagcgttgaaatcgacgtaaacgacgtggcgtgcttcatcatcgagccggtgcagggcgaaggcggttttctcgccctggacactgagttcgcccaggcgctgcggcgcttctgcgaccagcacaacatcctgctgatcattgatgaaatccagtcgggttttgggcgcaccggccagcgtttcgccttctcgcgcctgggcatcgagccggacctgctgctgctcggcaaaagcatcgccggcggcatgccattgggggcggtggtcgggcgcaaggcgctgatggacaacctgcctaaaggtgggctgggcggtacgtactcgggcaaccccatcgcctgtgccgcggcgctagcgacccttgaggtgatgagcgacgaacatctgcacgcgtggggcgccgcgcaggaagccgcgattgtgggccgctatcaagcctggcgcgcacagcaactgtcgccctacctgggccgcctcaccggtgtcggcgccatgcgaggcattgaactggcccatgccgacggcacacccgcccccaagcaactggcgcaactgctggagctggcgcgagaggccggcttgctgctgatgcccagcggcaagtcgcggcacattgtgcgcttgctggcaccgctgaccattgaacccgcggtgttggaggaaggcctggatattctccaggcgtgtctcgaagaactggacgagtaaaatgtatcaacaggtttgacgctgctccactcagtcgttgagcttgttcgtgaagtccgggcgaggtggatgaccgttgataagattcccgttgtggatatgtacgtatttctgtacgttaaacccacccaacaaggagttcccatggaaactatcaactacaccaatgcccgagcccatctgtccgaaacgatggaccgcgtcaacgatgatcacgtcccacttctactgactcgacaaaaaggcgagcccgtggtgatgatctcgttatcagagttcaatgctctggaagagacggcttacctgctgcgctcacctaaaaatgccgaacgtctcattaactcagtcaacagcttacgagcaggcaaagccaagccaaggcggttgattgaagaatgaacatactctttacccctgaaggctgggacgactacctctggtttcaacagaacgacaaagccgggctcaagcgcatcaacctcttgatcaaggccatacagagagcccccttcgacggcgtgggaaagcctgaacctctcaaacataatctgagtggtttctggtctcggcgaatcaccgcggagcatcgtctggtttatggcatcgaggatgatgaagtacaaatattgatgtgccgctaccactactgaaattgttctgacgcccgagccaaccttgacctgatccccccacccgctgaaaatgcccgacgtttttttgtctctccgcatactacgcagtgaaattttaatgcctgattcctacaccgaaaaatccgccgaagaatccgtagtcgccctgcacgccaaagccgaatacgaaaacgccatcaatctttcacagcatgtgccggccgccaagatcatcagcgagatggtgctggacgcgtttcacacctccaaggaaagcgaccagatccgcgagctgcgcgttgccatccgccaggcccacgatgccttcgatgatgacaaagcctatgagctgatgggccagctcaagcaattgaaagacgccgaagccgcagacaacgccgccctggaacacctgagcagccagttctcgatcagccgcatcttatccagtttcaaggacgacccagagtttcaggaactggtctacggcctggccctcaaggtgcttaaccagtcgcaccaggccatcagcaacccgagcgccggcaagggcaaagctgcacgcgccaagaaagacaacgaagtgtttgtgatcagcaaagatggcatcagcgtcaccctgccgctgcgcaccccgcgctccaagctcaatgtggaccgcgaggcgctggaattcctgggcttcacctttgtgggcgaaggcagcgaggcggagcttgcgagcgaaaccttcatcgacaacagcggtgccgagcagccggtcacgcgcaagagcatcgtgaccgcgctgcaacagcaaagcgcctttgacggctacgccatcgccgcccagtaagtagctgacgcaacccggcgcgcgtgcaaggcgcagcgccggttgccgtctacgccgatttgttccacaacatcgccgagcttttcatcatccccacggcgatggccaacagcaccaacacgcagcctgtcagcagccacggtgacggcaaggtgggccgggccagtaacatgaacgccaacgatggcgcgatcatcacgccgatgttgacgcctgccgagtagtagccaaggttgcggcccacgctgtcgtggctggaaatgctgctgacatagtgggtgatcgcggggaacacaatcatctcgcccaggctccacaacaccgtagcaagcatcaacagcgcgccgacctgaccaaagcccatcaagaagaaaccgctgcctgccagcaagaagccgatgatcagcgagcggctgctcgacaagtgcgccatgcgcaggttgatcggcacttcaaacacaatcaccagcaaagcattgataaagaaaatgatgcccacgtaataggccggcaattgggtgtagttgatgatgtacgccgacagaaaagtcggcggcagtgcgtatgccacgtgcaccggcagcgccgccaacaggatcaccagcagtcgcgaacgctcatgagccgccacctcgggcaagccctcgcccttgccagcgaagggcgcgtcttgggtggctggccggggccgtccgaaccgcaggcatgcggcgaaggccagcaaggacaacacggcattgatgtagaacaccgcgtcggcattgcgcagaaagatcaagctacccagcaacggcccgatggccatgcctatgttgatcgccagccggttgcaggaaaacgccaccttgcgcgactcaaggctgctgtgagccaccgtctcggagaacgcggccggtgtgaaggcttcgtaacaagcgccccagagaaacgacaacaggaacagcgcgagcaggttttccaccgagggaatgaccagcagcaacaccgcgttgaacaccaacgaaccgaggatgacccggttggccgaaaaccgcttgatcacggcgccgatgaccaggtcggtacacagggcgcccgcgccgtacacgccgaccaacaggccagccgtgcccgccgatatcgcgtgttgatgaatcaggtacgccgcgtagaaaggaaacgccagagtgcccatgcggaacaccagcgtgatcatgaacagtgcttgcaaccgcgcattaaggccgcgcaaggcgtgaaaagtgcccatcagcgcaacacgctggcacaggcgtggagcaaagctacagagcggctcatccggatgtcctttctcaatggcggcgccggtgtgtccggcgccaaactccatagctgggcaacctaatgcagcactgtgcggcgaacaagctacccatttggacaggtaggcggtgattgcggcctcaggccgggtgacggatatagcccaattgcagggccttgccgatggctgacttgccgttggtgacctgcaatttgccgaagatattcttcatatgaaacttgaccgtatgggaggtcatcgaggtcaggagcgccacttcgttgtaggtcttgcccaggctcacccaggacaatacttcggtttcccgtggggtcagcaccgtctgttgcgcgaccggcgcggcgtgctcttccagggcctcgtcgtacatcgagaccaacagcatctgcagttcactttgatgggccagcacggtctcgcgaaattgctggtcctcgccgaagctgcacagattgagcaccgagtagaaaccgcgattgccatgcacgataaaactggcgccctcgccaacgggtttgtaggggcccggcaccggcaccgcctcatcggccacggccagcaggtgttcatcactccagaaaaacggtttgatccgggtgcgggtcaatgaaaccagctcgccacgccggtagaaatcgtcggccgtgtcggaaggctccatggcttctgggtaattggacacaatctgcgcttggtccatcgacggcccacactggtagacctcaaagtgccccaggccacggcggctcagctcggcatcgagcaagcggcgcatatcctcgggcagcatgggcgatttcttatcgggttggccattaggtcgcacgggtatcttccttgagcattcgacccggtcgagcatgaagcatgcctggcttgtctgtccaggcagcggatgacaaacacaggggctagacttgcgccgcgaacgcctcgcgaaagcgctgcatctcctgcgggttgcccacggtcacccgtacccactgcggccagtccttccatacccgccccaccagcacattctgtgctgccagccgctcgatcacccgctctgccgggcgcttcacgtcgatcatgaagcaattgctgtgggaagcggtgcaggtaaagccccggcccttgagccaggcgatcgtctcatcgcgcaacctggcatttcgcgctttgcgttggcccaccagctgcgaatcttccaggctggcacgggcggccagcaagctggcgccggccgggacgttgtcgccaccgaacaccgccaaccgctccagcagcgccgggtggccgattgccaggcccaggcgcgcaccggccatgccgtagatcttggagaacgtgcgcagcaccagcaggtcgtcatggtcgttgacccagctcacgcaactgggggcgtcacagaagtcgatataagcctcgtccactaccagcacgctgcccttgggtttgtgcgccagggcctggcggatggcctcggtcgaggtgagcgtaccggtcgggttgttggggttgcacaggtacagcatgccggcctgtgggtccgccgcgagcatggcaggcacatcgtgggcatgctgggcgtcgaggttcacttcttgcaccggcgccttgatcgactcggccgcctggcgcggtacttcgtaggacggcgtggccatcaccaggccgcgggtctggctggtgaacgccagcaccgcgtagcgcagggcggccatcgagccggcaaacactccgacgttgtcttcggctatgccctgttgttgggcgaacagcgcggccaatgcatacatgtccgggtaagggtaacgcccggaggctgcaatcgcacgctgcatcgcctggcgagccgcgtctgaagggccgtaggggctttcgttgtaattgagcagcaccttgtcagatttcgtcggcgccgggctggcgagggcccaattgagctgccccatcacaggcagggccgcgcccagggcgagaagggatcgacgactgacacgcaccatgatggctactccttgtagaggcgcgagggattcgcgcgggccgttcagaagagtatgacgagaaagccgttgcctgatttaccaccaaggcgtatccctgcactcagtactttattgttatagcgggcgcatgcaacactttcactgccgccaaacccgcaacattgggttctgccggcatggactgatgactaaatggaagtggtgagcacttgatacacagacgggaaaaaaccgagcacttgaagagcaacatcaagtacttgatcaagagtcgtggcgaaacccagctttcgttaagcagtgctgccggcctgaccaggaccaccatctacaacatcctggaaggcaaggtcgttaacgtacagcagtcgacgattcgcaagatctcggacttctttggcgtctcctacgaagaaatcgagaccatcagttttgaggccaaggaagtcatcgagagcaatgtttccccgctgggtaacaagaacccggcagcagtacctgtgctcaaggaaagcctgctcatgcagaacctgggcaagcgcatcggtgaactggccacgctgcacccgctgacgtactacttcggcagcgcctgcaatttgatcggcgtgcgccttgagcacggaattccgggcctcaatgaaccgggggacttgctgatcgtgcagaaaggctcgtcgagcgacgataaagaaaagctggtgtacgaccgcgccaccaagaagctgttcatcaccctcgaaccctgtgggaactcagagcgtttgtgtgtcatcggcgacatccttgaggagcgcttcaatgacaacgtctgagggcgccgttgaaaacagcaaatacaagttgctgggctttgaaaacgacaagcgcctggcggtgatcatggtgatcgccacgggcaaggtcctcaagatcaagctgagtgaagtgctcagcagtgaaatgatggacaacttcaacaagatggaaatcaagaacctgtacaagaagttctattcccaaggcggagcactgaccgcttacgagataaacgaccgcaatgaaaactcctggatgatctacatcatcctgaacttgctgctgttcaccttctatatcttcaccagcattgccgcgaccaagccgatttacctggagtcgttgggcatcatcgtcacgccgggcacgttcctgtacccgctgacctttttgatcgtggacttgctcaacgagaatttcggcttgcgcctggccaggcgggccattctgtttgcatttgccagcaacgcgatgattatcatcctgctgtatggctcgacgttcctgccggggctgccgggctggaagctggatgggccttataccgacgtgatcctgcaagtgtcgtcggtgctggtggcctcttcggtgtcgtttctggtgtcggagaatataaactcctacctgctgtgcaagatcaaggagctgactaactccaggtacctgtacttgcggatattcctcagtacgttcttcgcggtgattatcgacagcttcctgttctgcttcattgccttctacggcgcgatgcagaccagcgatatcctcagcatgatttacgtgcaaatcgcgatcaaagtcggctttgcgttcttcaacatcctgcctgcctatggcgcacgctcattgttcaaacgctatcaataatcctgtaggagcgagcttgctcgcgaagaacgtcaacgatcacgcagcgcatctggtggaacgcggcgctctcaggtttttcgcgagcaagctcgctcctacaagggttatttgagttgcaacttgtgcttgaggctctgcatgacaggtgtcttgttctgcaggtagtcattcaagccccgagcgcgcaggttgcacgcatcacactcaccgcagccggtaccgatgatgccgttgtagcaggtcagcgtctgctcgcgcaccagctccagttggccgtggtaatcggccagggcccaggtctcggccttgttcagccacatcaacggcgtgtccaggcgcacgtcgtattccatgcccagcttgagggcctggttcagcgctttgacaaactcatcccggcaatcggggtagccagagaagtcggtttcgcacacgccggtgatgacggtctcggccttgacttggtaggcgtagatcgcagccagggtcaggaacaggatgttgcgccccggcacaaaggtgctcggcaggctttcacccgagctgttcacggtcggcaccggaatgttgtcacgggtaaggctgctgattgccagctcattgagcagggacacatccatcactttgtgcacagtggcacccaactgcttggccaatttctgggccacttcgatttctgccacatggcgctggccgtaatcaaaggtaatgcagtgcacttcgtcatacagcggcagggcctggatcaggcaggtggtcgaatcctgcccgccactgaagaccattacggcttttttactcattgcattgcttcctgcatttgtagaattgggaggtaggagcgcgctcgctcgcgaaaaacgtcaacgataacgcagcgctcaataaaaaaccccgcgcgactttcgaaggcggggcttttttactgcaagaccactcagtgagcgtaggtcagcaacagctctttcggcacttggaaatccagggacatcatcacgctgagcgcggtgatggtgaagatcgagaacacgaacagcttgcgcgcccagacggtgtcatccaccgccttgtagccggtccaggccatgtacaaccagtacatgcccatggcggcggcgacggcgaggtagctcatgccggcgtagccactgaaggtcaacatcaaggtcgccacgaggaaggccaggatgtagagcaggatgtgtttcttggccacctggatgccacgcttgaccggcaataccggaatcgacgcagccaggtagtcattgaagcggaaaatcgcgatggcgtaggagtgcggcatctgccacaggctgaacatcaccagcagcgtcagcgcggccatgtcgaagctattggtcacagccacataaccaatcaccggcggcatcgcccccgacagactgcccaccagcgtgccgtgaaccgacttgcgcttgaggtacaggctgtagagaccgacgtagatgacaaaaccgatcacggcaaacagcgccgccaacgggttggccaccttgtacaacagggccacaccggcaacacccaggacggtcgcatagatcagtgccagcttcagggagatgaggccctggaccagcacgcgattcttggtgcgctccatcttgatgtcgatgtcacggtcgatgcagttgttgaatacgcaaccggaagcaaccaccagggacgtaccgatcattgccgccaggaagatggccagatcgacatgtcccttggaggccaggaagaaaccgcccgccacagaaagcacgttaccgaaaatgatccccggtttggtgatttggataaagtgcttaagcgacatcgggtcttacctcacttcgccatcatgtaggtgtggatgctgaacatgatccacagcgacagaccaaccagcagaacgatcaccaggcctgcgaacacaaacgcgatcacgttctcgcgctgctctttggagcggtccaggtgcaggaagtacaccaggtgaaccagaacctgaatcaccgcgaacgccaggacgatcatcaaggtgatcgacttcggcaaggttgggtacatcaccaggccgaatgggatcagggtcaggatgaccgacaggatgaagccgatggcataagactttacgctgccgtggctcgaatcgtggctgtcatgggagtgtgcattagccattacagagtccccatcaagtaaacgacggtgaatacgcagatccagaccacgtccaggaagtgccagaacaggctcaggcagctcaggcgggtcttgttggtgttggtcaggccgtgcttattgacctgatacatcatcaccgccatccacagcaggccagcggatacgtgcagaccgtgggtgccgaccagcgtgaagaacgccgacaggaaaccggaacggtgcgggccgtagccttcggagatcagcaggtggaactcgttgatctccatgccgatgaagcccaggccgaacaggaaggtcaggcccagccagctcagtacgcccttcttgttgcccttgtagaaggccaacatggcgaagccgtaggtgatcgaactgaacaacagcaaggcggtttcgccgagcacgtaaggcagttcgaagatgtcgtggcccgacgggccacccgctacgttgtttaccagtaccgcgtacaccgcgaagatcgacgcaaacaagatgcagtcggtcatcaggtagagccagaaaccgtagacggttatcggccccgagtcgtggtggtggtcatcgtgcccatggtcatcgacatgggcgtgtccagcattggtcactaagttcgacatggtttaagcctgttccaacgaggtttctacacggttggccgggatcttcttctcggctaccaggcgagcgtgctgctcggcttcgatgcgttcgatcgtttcgaccggcaccatgtagccttgatcatcacgggcagcgtgaatgatgaagtaaccgatagtgcccaccaggctcgcgattgccagccaccagatgtgccagatcatcgcgaaaccgaacacggtcaacagcgcacccatcaccacgccagtggcggtgttgtttggcatgtggatcggttcgtagtgcttgggcttctggtacgcagtaccgtcttccttggcttcggtgaacgcatcaatggtgttcgcagtagggatcacggcgaagttgtagaacggtggtggcgacgaagtcgaccattccagggtgtggccgttccatgggtcgccggattcgcacatgttctgcttgcgatcacgcacgctgacgtacagctggatcagctggcaggcgatacccacagcgatcatcaccgcaccgaacatggcaacgtacaggtacggtacccactcagggttggtggtggcgttcagacgacgggtcatgcccatgaagcccagtgcatagagcggcatgaacgcgacgaagaagcccgagatccagaaccagaacgcagccttgccccagccttcgtgcagcttgaagccgaacgctttcgggaagtagaagctgaaaccagcgatgtagccgaataccgcgccaccgatgatcacgttgtggaagtgggcgatcacgaacaggctgttgtgcagcacgaagtcagcacccgggatggccagcagtacgccggtcatgccgccgatggcgaaggtcaccatgaagcccagggtccacaggacctggctggtcatgcgcagacgaccgtggtagatggtgaacagccagttgaatagcttcacccccgtcgggatggaaatcagcatcgtcgccaggccgaagaaggcgttgacgctggcccccgaacccatggtgaagaagtggtgcagccacaccatgaagcccagtacggagatcgcgcccgatgcgtagaccatcgagtggtgaccgaacaggcgcttgccggtaaaggtcgagatcacttcagagaagataccgaacgctggcaggatcaggatgtacacctcagggtgaccccatgcccagaacaggttcacgtacatcattggattgccaccaagttcattggtgaaaatgtggaaatccaggtaacggtcaagcgacagcagcgccatggtagcggccaggatcgggaacgaagccacgatcagtacgtttgcccaggtgcaggtccaagtgaagatcggcatgtccatcagtttcatgccaggggcgcgcattttcaggacggtggccaggaagttgacccccgtcaatgtcgtcccgagccctgataactgtagcgcccagatgtagtagtccacacccacgcccggactgtattgcagccccgacaatggcggatacgcaacccaaccggtcttggcgaattcgccgacgcccagggaaacgttgatcagcaccacgccggacaccagcagccagaagctcagggagttcaggaacgggtaggcaacgtcacgcgcaccaatctgcagcggcaaggcaaggttcatcaagccggtgaagaaaggcatcgccatgaagatgatcatgatcacaccgtgggcggtgaagatctggtcatagtgttcaggtggcaggtagccaggcgaaccctcggtggccatggccaactgggtacgcatcatgatggcgtcggcaaaaccacgcagcagcatgaccatggcaacgatgacgtacatgacgccgattttcttgtggtcgaccgaggtcaaccactcggtccacaggtaggaccacttcttgaaataggtgatacccgcaaccagcgccaaaccacccagcgcgatcatggcgatagtcaccattacgatcggctcgtggaatgggaccgcgtcccaacttaatttaccaaacatcgtttactcctctgccccagcagttgaatgcgcgcccgtatcagaaccttcaaccacggccacttctttcttctcgtgcttgaccggcttgcctggcttcataccttcgtacttgtcgacgattttctgaaacaggtccggctcatacgcggagtacaaggcgacagggttgttctggctcggtttggtcagagcgtcgtattcagcttgatcaagctgtttaggtgcggccttgactgcagctacccaggcgtcgaaatcttcctggcttgtcgagatcgctttgaatttcatgccggtgaagccagcgccgctgtagttggcggagatgccttccatttcagctttctggttggcgatcaggtgcaggcgggtctgcatgcctgccatcgcgtagatctggccacccagtgcagggatgaagaacgagttcatcacggcgtcggaggtgatccggaagttaagcggggtgtgctccgggaagcggatctcgttgacagtggcgatacccaggtccgggtagatgaacagccacttccaatccagcgcgaccacttggatgttcacaggcttgacgtcggactccagcggacggtacgggtccagcgcgtgggtcgacttataggtgatgtaacccagggcgatgatgatgaggatcggaaccagccacaccgcgatctcgatcttggtggagtgcgaccacttcggcgcgtaggtcgcgctggtgttggacgcgcggtatttccaggcgaaggcgaaggtcatcacgatcacaggcaccacaaccagcagcatcagcagggtagcggtgatgatcaggtttcgttcatccagaccgacctgtccttttgggtcgagcaaggtccacttgcagcctcccagcattaacatcatgccaagcagcggcaaaaagcctagtaatcgggggtacctgtttttactcatctcacgacctctaaagcagcttgcgcaatgcagttgggttttgatcgccaacacttcaccctgccaagggttggcatttctcttcgattgaataagagcctgcccgacacgtcatgactgtacgtttcacggacctgcagtgagttcttattcgatttcgtggctaaaggccttgttacagaccaattccatttggtgcggatagttgaaaggctgccggaacctggggtcgcattgagccttccatctgctcctcgaccgctccaatgctcaaatattgaacagcaccggacattcagtgcgggcgattgtagttagctagcgatgtataaaccatgtcttataaagaaataatttttatcgattccagcaacaatccttcaccaaagttgcaaagattcgcgatcttatcgtgttcgattctcaacaaaaaccacaaaaattgccgtgttattgggcacagtgccacttcccttacggcttgtaagggcatgcggatgccgtccaagtccccataaaacaaggcattcatagaggcagcaggggttggggccgcacacaaatcgggcctccgcacgaaccacgaactgacagcacaatttgtgcgccgggtgcaaattaaagggccgatttggcgggtcagaaacgtcctgcgacagcgtccgtgtgacaacatgtcgcacgctgcgcgcaccttccgttgcccctcgtcacggtgctttcacaaatccctacaaacaaaaacgctccggccttcattcagaaggaacggagcgtttggcaggctcggcgactcaggctttggggtgacggttgcgatagatgcataggggcaccaggatcgccgtcagcacgaatgccaccagtgcccattgggccagagacaggccgagaatcggtgggtagggggtgctgcagaagccgtcgacctggaagcccaggggaaacaccttggccaggggcaggtcgtcgacgatcggttgcagcacatcgataccgcagctgacctgggggaagaactgggtgtacacgtgatggccggccgcagccacgccacccaaggcgctgagcaccaccaacccttcaaagaacgtcagcgcgcccttggtgcgcatggcggcgccgatgaacgcgaagagcgcaatcagcagcaaggcgtagcgctgcagaatgcacagcgggcacggtgcttcgcccagcaccacttgcatgtacagcgccccgccaatcagcgccaggcagatgatgcccagcaacaccagaaagcgccgctccctgcctaaacgcatgtcgtcaatcatccccgtttttccctttctctgattatggttgtgcctgatggcaacaagtttacacacaggcagtggttaaaacagagaggggttaacagcggattaatcgtggcaaatgtagcgattgtgcggacgccatcgcggggnnnnnnnnnnnnnnnnnnnnnnnnnnnnnnnnnnnnnnnnnnnnnnnnnnnnnnnnnnnnnnnnnnnnnnnnnnnnnnnnnnnnnnnnnnnnnnnnnnnnnnnnnnnnnnnnnnnnnnnnnnnnnnnnnnnnnnnnnnnnnnnnnnnnnnnnnnnnnnnnnnnnnnnnnnggcccgcgatgatgccgatacggtcaactggccaaactctattccagcgccgccgcgggcccaaagaactcatagcgcgcctgcttctgcggcacacccagcgccttgagatgccgcttaaccgccgccatgaagcccttgggccccaggaagtagacatcaatatcacgctgctcgggcaaccaggccgccagttgctcctggttgagcatcccgaccttgtctgccgccgggctgatgccgtcatcctcggcatagcagtagaaacgcttgagctgcggatgctgggccgccagggtgtccacccaatcacggaaggcatgtacgccgccgttacgagcgcagtggatgaagtgcaccgggcgttcggttgccagggcggcttcgagcatcggcagtgtgggcgtaatgcctaccccgccgctgatcagcaccagcggtttatcactggcggccagggtgaactcgcccgacggtgggaacaggtcaatggtcgcgccgacgtgcatctggtcatgcaggtaattggagacccgcccacccgcttcgcgcttgacgctgatgcggtacatcccggtgtcagtgagggccgacagggaatagttgcgacgcacctcttcgccatcgagtaccagtttcaggccgatgtactggccgggcgctgcggccaggatcgggccgttgtccaccggggcgaagtagaaggagatgatctcgtcgctctcctccacgcgtttgaccaacaggaacggccgcgcaccccgccagccgccgggcgcctgggctttttcgtcgtagatggccgcttcggcgccgatcagaatgtccgccaactggccgtaggccgcgccccaggcactcatgacctcgggggtggcaatctcgctgcccagcacttcggaaatagcccgcagcaggcaggccccaacgatggggtaatgctccggcagaatctgcaaggccacgtgcttgttgatgatcttggccaccagatcgcccagttggtccaactggtcgatatgccgcgcgtacatcagcacgccattggccagggcgcgaggctggtcaccgctggcctggtgggcctggttgaacagcgggcgcacctcggggtactcggacagcatcatgcgataaaaatgggtgatcagcgcttcgccgccactttccagcaggggcacggtagatttgatgattgcacggtcttgggcactaagcatgggagactcctgggtcttcttactgattgccttaaagcagtcagcaatcatgccaacttataaatcctttaatttcaacgagttaaatattatgtagtcagtatgacctcctacactttatagtcataaggactacaaggagtcattatgactgcacaacccctgctcaccaccttgcttccgttggtcgctgacctgtcccgggacttgcccgaaggcgagcgctaccgacgcctgctgcaagccatgcgcgccctgctgccctgcgacgccgccgcgttgttacgcctggatggcgagtggttggtgccgttggcggtggacggcttgagcgccgataccttgggccgacgcttcaaggtcagcgaacatccgcgcttcgagatcctgctgagcagccccggccctacccgcttcgacagtgacagcgaattgcccgacccttatgacggcctggtcgccggcttgcatggccacttggaagtccacgactgcatgggctgcccgctgtttatcgacgaccagccctggggcctgctgaccctggacgccctcgataccgagcggtttgaacgggtcgaactggacgccctgcaagccttcgccagcctcgccgcggccaccgtcaacgtggctgagcgcatcgagcgcctggcgctgcgggccgaagacgagcaccagcgcgccgagatctatcgccaggccagcggccagcagcacaaggaaatgatcggccagagcaaagcgcacaagcgcctggtcgaggaaatcaagctggtcggcggcagcgacctgaccgtgctgatcaccggcgaaaccggggtcggcaaggagttggtggcccaggcgatccacgccgcctcttcgcgcgccgacaaaccgctgatcagcctcaactgcgccgccctgcccgagaccttggtcgaaagcgaactgttcgggcatgtgcgcggcgcctttaccggcgcgttgaacgagcgccggggcaagttcgaactggccaatggcggcaccctgttcctggatgaagtgggtgagttgtcgttgaccgtgcaggccaagttgctgcgcgtgctgcaaagcggccagttacagcgactgggctcggacaaggagcaccaggtggacgtgcgcctgattgccgccaccaaccgcgacctcgccgaagaggtgcgcaatggccgctaccgcgccgacttctaccaccgtttgagcgtctacccgctgcaagtgccagcgctgcgcgagcgcgggcgtgatgtgctgctgttggcgggcttcttcctcgaacagaaccgttcgcgcatgggcctgggcagcctgcgcctgaccactgatgcccaggcggccctgctggcctacagctggccgggcaatgtgcgcgagctggagcacttgatcggacgcagcgcgttgaaagccctgggcaactgccgcgagcgcccgaagattctcagcctgagcgccctggacctggacttgcccgacgtgactgcggcggtggccgaagaagcaccggcccaagccctgaccatggtcagcggcgacctgcgccaggccaccgagcactaccagcgccaactcatcagcgcctgcctggaacgccatcagcacaactgggccagcgccgcccgcgaactgggcctggaccgcgccaacctggggcgcatggccaagcggctaggcctcaaataaagcgggcacctccgttgatcgttcccacgctccgcgtgggaatgcctcacccgacgctccgcgtcatggcctcgagagcggacgcggagcgtcccgagcggtattcccacgcagagcgtgggaacaatcgagcctgagcgccctggacctggacttgcccgacgtgactgcggcggtggccgaagaagcaccggcccaagccctgcccatggtcagcggcgacctgcgccaggccaccgagcattaccaacgccaactcatcagcgcctgcctggaacgccaccagcacaactgggccagcgccgcccgcgaactgggcctggaccgcgccaacctggggcgcatggccaagcggctgggcctcaaataaagcaggcacctccgttgatcgttcccacgctccgcgtgggaatgcctcacccgacgctccgcgtcatggcctcgagagcggacgcggagcgtcccgagcggtattcccacgcagagcgtgggaacaatcgagcgcacgggccttacgaaacaccagcacattccccagcatcaccagcaccagccccatcaacgccggcgccgtccactggtagccctcggcgaatgcggacacattcaacgccaccaccggaaacagcaccgtgcaatacgccgctttctccggccccatgcggcccaccagggtgaggtaagcggtaaaaccaatcaccgagcccgggatcaccaggtaccacagcgcaccgatataccgtgcactccagtccatctcgaagggaatgccacgcaccgcgcaataggtcgccaacatcgccgccccataggccatgccccaggcattggtggtcagcggcttgagcccggccttctgttgcaggctagacaacaggttgcccgccgagaagcacagggtgcccagcagggccaagcccaggcccaacaaggtttgcgggctggcggtatgcccaaccagctccggccagaacaaaaagcccagccccagcagcccaagcgcgccgcccatcagcacgttacgcgccacccgctggccgaaaaacacccgggcattgagcgcgttccacaaggtcgccgtggagaacaccaccgccaccaggccactggggatccattggctggcggtgagaaagcacatgaagttaacgcagaacaggcacagcccctgcgccaggcagatcaggtgcccgcgccggttcatcgcctgcaacttgcggctgagcagcaacagcacgaacagcaccagagcggccaggccgaagcgatagacaatcgacacgggaatcgcgaccacgcccaactgccatttgagggcgatccaagtggtgccccagatgagtacggtgagtaggtacaggaaaagattcatagccggctccgtcgattgagccacagtgtggccttcaccccctcgcaggctcttgcacattcttgcgcttttgtcgggcgatgggctcacagcaccagcggtggagcgtaggatgcaaagtgtcggagaacacaccatgccagaactgcaatcgctgcacgtcttccaagccctcaaccgctcgccccacgcacgcttgcaagcctgcgccgagctcggtgacgggttggctgcggccgtgtggagcaaccaccatgacgcccaggattaccaggcccccagccatcacaccttgtcctgctacatcggcggcggcacgggcacctttcggcgtgatcagccgggcctcaagggtggccccgacaaactgtgcatcctgccggccgagcatcagtcggcctgggtgatcaatggcgatattcgcctggcccacctgtatttcagcccggaacaatttgccctcggctgcgtcaccctgctggaccgtgagccacgggagttgcaattgcgtgagggcaccttccttgaagaccccttccaggcccggcgttttcaccagttggtcagcctcaactggcacgagcccggcgagcgactgctgacgagcagcctggcccatgaactgctcagccataccttgctcagccaggtcggcgcccgcgaaggcctgcgcttgaaaggcgggttggccgcgcaccaacggcggcggttggtagagtacatcgaccagcatatggaagacgccatcagcctcggccagttggccgccatgtgcgcgctgtccgaataccatttcgcccggatgttccgccaaagcttcggtgtgccgccccatcaatacctgctggcacggcgtctggcgcgcgcgcaaaacctgctgcgcagcagtgctttagcgatcagtgaggtggccttgctgtgcggtttttccagcgccagccatttcaaccagcgctttcgtcacgccatgggcgccacgccgagccaataccgccaggcattctgcgcctagaccatcaagcccaacgtctttgccttggccaccgcctgggtgcgtcgctctacccccagtttgctgtggatacgccgcgcgtgcgtcttgacggtgtgcagggagatatacaggcgatcggcgatttccaggttggagttgccgagcgcgatcagttgcagcacctccagctcacgctggctcagcgggttttgcgccgccccggcaggcgcggcctggggctccaggcccagctcactcaaaagccccggcgcgcgtaaacgcaactcgcggaccgcctgctgcacctggcaacgctctgccagcgccaagcccgcttgcagcgaccggcgcgccaacgccgggtcgccaagctgccaggtcacttcaccgagcaccaggtgcaattcggtttccaggcaaagcatgccgcgttgccgtgaggtgtcgagcaaggcattgagccgcgcaatgggttgctcggcgcagcccagcttgacctcggccagcaccagcaaatactccaggcgcgggatcagctccaaggtggccggcggtgcctgcttggcgcaaggcccgcgaaagtggcgcaacacccggcgcacggcttgcaccgtcaattcagcgcggccttgctgcaaccagaagtgcccactgaccaatagcagtaccgcgcggtacaccgtgtcgggtacctgacgctgctgcatcaggcgctcggcgtcgcgcaattgaatgaacgcctgggcgtagtcgccacgattggctgccaacagcgccaggcccagaaagccatacagcacgcgtttgtcctggctctgcaggcacatgctcaagccagcctcgaaacattcagcggccaggccgtcctggccccgacgcaaggctagatgcccgcgccgcaggacaatacgccccaccaacggcccggcggtgagacgttgcccggccaacatcgcctgcaccgtctccaataggctctgtgcccggtacggcgcgccacgctgctccagcaactgggcgtggtccaactccagcagggcctccaataccagcgaaccgtgggcccgggccaggcacagcgcttcacggttcaagccttgggcggcctccaactcaccgcgcagcaaggcttgctgggtcaggcccgacaggcacatcagccgtgatgtccaggcgctgtcaggcagcgcttgcagggcttcgagaaagtgctcacgggagcgttcggcatcgccgctcaaatgcagcaaccagccccattgcgcctgccagcgcgccagcagatagcgttgcgcggcggccgtcggttgcggggcaaagcgggccagttgctcgatgcacaaggccgcctgttcgaatcgcccggcgaacaacaacgcggccgtgagcagccccaccaactgcgcggaacccaacatcaactcatcgccatgctgttcatgcaggcgtaacagcaacacggcgttctgctggcgaaacaaatcctcgaaactgaagtgctgcaacaggctcaccgccacttcatattcctgcgccagcaacgcctgctcgaaggcggcttgccagtcgcgctcggcgctgaaccactggcaggcgcggcggtgccacgaacgcttggccggccagggttcgtcgcgcagcaggcgcgccaacggtgggaagatgtgcagccagtcgctggtgtcttcccagggctggataaacgccccgagcgcctgtagctcgcgcaggtactgatcgccgtcgccatagccgaacaggtgttcgcacaggctcaggttaaaacgcggcaagtgagccagtacacgccaggcttcggccagtggcgccgacaaggtgctgaagagttcgtgttgcaggtaatccagcaaggtcttatcagggtggctatcgcccagcgcggcgatgcgcacaccggcacaccaaccgccgctgaattgcatcacactgtcgacgttctgccctggggcgagcaacgcctggacctccgcagcgctgaacgacaactcactgcactccagcaattcatcctccagcaacaggcgcggccagttgcacaccgggcgccgccgcgcacccagccaccacgtcagttgcgcactgctggcgctgagcagacggtcgagcaacgcgtccaattcggggcccggcaggcggcagaagtcatccagaaacagccacgcaggattgggccagcggctgaggtcgagcaataaggtggcttcatcgataaacaccaggcccagctgttgcgccagccgtgtgcacaactccaacgggctgagtgctgcgccatggagcggcatccaatgaaccaggcatcccgccggcgcctgcaatgcacactcggcgagcagcgcactcttgccgctgccacccggcgcgcacagcaacctcacacgcgcctgcgccgcgagcaaaggctgtgacaagcgcggacgcaacaggtggtgggcggacagccgtggcatgcatccaggacggtccaggcagcgggtcatggcggtcattgctgcatcctgctgtttttattgttgcgtcaccctagacctgtggttggcggttgttgaagaagtattcagcggggtgattgaagaccataaaaaccgcggtggacaccattcggtgtgggagctgggttgcctgggatggccataggtatctacacaactttgtgggttgtaacagcagacggtaaccacgatgcgaagcgagccgctcttgatcttgctcttgatcttgctcttgatctgcttgtgatcttgatctcaggcgccccgttaaaccacgctggccggaattcgacagggatttggggggtaaaccggcagggatgccggcgaattacgggcacaccgagcctaagcgaggtgccgagtggtggggcaagagccctttggttactttggggcttttccaaagtgacccgccgtcagggcggaaccctaagctgccgttaccgcagcaatggatatgtacacaatccaactgtgttgactgtcaggcagccttcgcaggcaagccagctcccacatttttgacctcacttcgatccgcaatcagcgaacgccctccgacctcagtgctgccggggtgtaatccgctgccttggccgcgaagccgaacataaagctgcttttctcttcgttcttcatgcccagcgcgatgtagcgcccggcaatcaggtcatacagggtttccacggtgtaggccggcacctggtggtcgtagtagaactgcgcatggccttcggcaacgcgccacagttggccgcggccgtcgtagtggtccacgagggcgacttgccagctgtcttcgtcgatatacatgtggcgcttggcgtagatgtgccgttcgttgggcttgacggtgccgaccacttcccacacgcggtgcagttcataacgggtcaggtcctggttgatatgcccggccttgatgatgtcgtcgtacttgaggctcggcgaatcgagtttgtagctgttgtaggggatgtacatctccttcttgcccaccagtttccagtcataacggtcgggcgcgccagagaacatatcgaagttgtcggtggtacgcaggccatcggaggcggtgcctgggccgtcgtaggacacctgcggcgcgcgccgcacacggcgctggccggcgttgtagatccaggccaggcggggttccttcacctggtcaagggtttcatgcaccagcagcacattgcctgccagccgcgccggggcggtgaccgactgcttgaaatagctgagcacgttggcggccttggccgggtcgatatccgggatggcctggggcaccgccacttcttcttcgaagcggatcggcgtgtagctgccattggtctggggcgtggcctgggtgatgatgcgccgcaggttgccgccgtggtaacgggtgatgtgattccacagcacctccacgccattcttggggatagggaacgcgtagtaacggttgccggtgaaattctccaggccgttgccatcgttgatcgccttcacattcacggcgctgcgcttgatcgactcgtaaatgtccgccggcaagttgaccgtgcggtggctgggatacaccgggatcttgtaggtttctgggtagcgcttgaacatcgccacttggccgtcggagagtttgtccttgtacttgtccaccgtggcggcggtgatcacgaacagcggtttttcgttggcgaaggggtcagccaggaaacccttgctgtccaccgcgccggcgtttttcgggattccgccggtccaggccgggatcgagccgtcggcattgccggctttttcggcgccgaccggggtgagggtggtgccgagcttggcggcttcttcgggcgatactgccgccattacgttggcggccaatacgctcagggccaacactgcaatcatcttacgcatagggtcttgtccttcttttaagccagatcagaagttcacgccgaagctgagggcgaggaagtcgcggtcggtcagggtgttgtagtcaccgccaaaaaaatcggtgtagctcaggcttgcggtgtaggtgctgcgatagtccgcatccacgccgacgctgatggccttggcgcctttgttaaacaggccgttggggccgtaaccggccacgtcatgggaccaggacaggttgggcttgaggttcacaccggcaatggcgttgttgtagtcaaggatcgcccgcgcccggtagccccatgaggtggaggtgacaaaaccgtcggtgtcaccttgaaaaccataggcgccgtataccgagtctcggccgtagcgcagtttgcttttgtcttccaggccggcgacgtgcaccaccgccgcttcgcccaccaatgtcaggcgctcggcgcccagtacctggtcgaagaactgggtcatggtggtctggatctgggtgatttccttgcggcggtagcctttgttgtcatcgccgaaattgctgcggatgggtgaagcgagttggcccgcgatggggttgaccagggccagggtcaggtcagtggtgttgagctgcaccggcgcattgggccgatagctgatttcgccggtccacgccgtgcccgtgggcaaggtagtagagaaactggcgccgaacaggcggatgtcttcggggtaatccaggtagtactggccacggccgagcatggtgctttgcgccaaaccggcaccggagccaggtgccaggctgttggcggtgttgatgatgcgcccgatggtcgccaggttggtattggcggtcagggtgccgacggtcggtgtgcggctgtggtagttcatgaagtacaggccgtattcggtgtcatcacccagccagcgcagggccgcgccgaactggccggagtcacgcgcatcgcggtcaccggcacgccgtacaatcaccccttcattggtcacgccaaacccttggccaaaggcagccgccaccggttgcagcggtcggatcgctgggctgccgacggtgtagttattggtgcagccgtccgccgccacgtccccaccgaagaaggtgccgcagttgtcgagcaccgtctggtcccattccagttggtagaaaccttccacggtcagttgattggtcaggctctgggaggcaaacagcatgttcaccgggatcaagccttccttgatctcggcaccgggcctgcgaaacgccgacacgtcgatcgggttgatgctgttgatggagttaccgatgaaggtactttcgccccaactgaccacctgcttgccggcgcgcacggtgccgggcaggtcgcccagggagtagttgtggtagacgaaggcatcgaggatctgcgcaccgctggacttggcgccttccttacggttgtggtcgctgatgggcttgaactcgcggccttcgtccttgagctcgaagtcgtaccaatacttgccacgcacgaatacgccggtgtcgccgtacttcaactcaaggtcgtgcagccccttgaagatcttggagaaggtctcgcccttcttgaagttgaggcgcccgtcatccccggtggacgcctggcccgtcccgccattgaccgtgccgaccaggcttttatcggcatcgcgcatgccccaactggcgccgacggacagcgaggagtcgaattgcccttcgatctcgccgatattgaacgaaacagcctgcgcctgggcacagcagcccagcgcaaccgcagtggccagcgcctgtggcgtgaagatggcgcgcattattgtttttgtcatgcgtcttccccggtgagtgacagaaggccccaccctactgccgcccttgaggagcgataagcgcaccaaggaggtattcgtgttgtcgctcgaaaggatgaaagggttctctggcagggcgttggcctggtggcatgcatgcgatggatgaagggttatcagaagaatcgatggcgccttgtaattattgccgatctggtaatagtccttgtcccgatttgctattactcattctgttacaaccgattattcttgcctggctttcagggcaaacgcccgctcccgcatcggggagaaaagccgatttataacggattgatccagtaatcagtctgttcccggtgttcactgacgttgatttgtcgctccttgatccaacgtcttacttcggccgctgcctatgcagcggccttttttatgccccaaataaaacggggcgtcatcgacgccccgtgggattcattgatttaccggcaatgatcagaggctgaacttctgcaagttagccatcatttccttcaacgcctcaatgttgtccttggggtgcgcagccccttcgaaatcgcagatctgctgccagtgcgcggccacatcttccggcgaaaaaccggcctctggatcaaaacccacacccagactacgctcccagcgggtcttgccgatccagccgccccccacttcaaacaagccggcagtttcttcacaggcttcactgcccaggaacaccaccaatgggctgaccagttccggcttgaggcgctcgaacacttgcggcgggatcagcccttcggtcatgcgcgtgccaccggtaggagcaatcgcgttgaccaggatgttgttcttgcgcccttccagcgccagggtgcgggtcaagccatacaagcccagcttggccatgccgtagttggactggccgaagttgccgtagataccggacgtcgacgccgtgaaaatcacccggccataaccctgctcgcgcaaatgcggccaggcggcgcgggtgactttgtaggcgccttcgacatgcacccggtaaaccaggtcccagtcgctgtcgtccattttgtggaaagtcttgtcgcgcaggatcccggcattattgaccaccacgtcgacccggccgaaaacatccaaggcgttctgtacgattttgtcgccgtcggtgacggagtcatggttggcttcggcaatgccgcccgccgcgcgaatctgcgccaccacccggtcagccgccgaggcattggccccctcgccttgggttgagccacccaggtcgttgaccagcactttggccccgtgcttggcgaacagcagcgcatgggcctggcccaagccaccaccggcgccggtgacgatcacgaccttatcctggaactgcactgactcactcataccgaactccgctggcgacaatgggaatacgcagagtgtcacgcacgcagcctttggtcacaataaagacgcccacggctgaatggtgcctgataaggcagcgggatgatgcgcaggctcaggaataggccgcacgcggtgaaggctggccgatgcgctcacgaaacgtttggtagtgcctgagcacctggaccggcgcctcgatctgcgggtagtggccgatatgggccagccatatcgtgtcgggatcgggcaccagttggcgataacgctcgaccatatgggcaccggaaatcgggtctacctcgccgtcgatcacccgcagcggcacttcgccttgctgcatggccgccagccagcgctcgcgcaggcggcggcgttggggaatgtaggcgatgagtttgtgcaggatacgcgggccgtcattgcaactgatcaaactccagaagtcatccagcacgctttcactgggccgcgtctgggggccgaagatctggttgaaactgctggccaaggcattgcgcccaaaggcccgcccgatcatccagcccagaggactgagcagcagcttttgcaccagcgtcggccgatgggtttcgggaaacaggccgccgttgagaaatacgcagctcgccatctggaatcgtccctcgtaatgccgggccaataattcctgggcgacgctgtcgccatagtcgtgggccaatacatgcactggctgctctacccgcaggtgctcaagcagcgcctgttgcaagtcggcctgttccagcaggcaatagtcgtggttcaagggtttggccgagtcgccaaagccgagcatgtcgcaggcaatcaccaggttgcgctgggccaggggctgccacaggtagtgccagtcccaactggccgtggggaaaccatgaatcagcagcaacggctcgccctgcccggccacccaataccgcacggtgtggtcacgaaagacgaagtcctggccgcgcttgcgccaggctctgagcggtatctcggcgagtggcatcagcttttatacccggggtcctggtggtccaatttgcgtagcagcgccggccaggccagcgcaccacccataccttgggcgctttttgtgacagctgccaccatcgccttggcaccggcgagaatctgcggttcgatggcgatcaactcggtgccgccgctttgggccagtacctgaatctcgcaggcgcgctggaaggtgaacatcatcaggaaggtgtcggcgatggtgccggcgcaggtcagcaggccgtggttgtgcagcatcaggaaattgttctggcccagatccgcttgcagccgggccttttcctcgtgattgagcgccacgccctcataggcgtgatagccaaggctcgacagcacgaacagcgattgctggctgatgggcaacacaccctgcttttgcgcacacaccgccacgcccgcagcagtgtgggtgtgcagcacgcaggtcacgtcgtggcgcacttcgtggatggcgctgtggatggtgtagcccgcggggttgatctcgtaggaactgtccatttgcttattgccggcctggtcaaccttgaccaggctcgacgcggtgatctcgtggaacatcagcccataggggttgatcaggaaatcttcagtgcccggcaccttcgccgaaatatgcgtgaagatcaggtcatcccagccgtgcatggccaccagccgataacaggccgccaggtccacacgggtttgccattcagcggggctgacctgggctttgacgttttgtggcgatggagcaggggctaggctcatggcaatgacctccttggcgcacttcttatggtgtctaaagtgagagccagtctagtcagacgccgaggcgtaaggagtttccttagcagccagcttgatgactgagcgagtcagtcaagagaatagtacaaatacgtgtcagacaagcgccgtcaacaacggcgctccttgggattcaaccgcgcaacgcggtgatcaaatcggccagccaaggctcggcgtcggcttccggggtaacgctctcgctggcatccaggcgcagcatcggctgcacttcgcggatgcccatttcggcgaacaattcgcgcatttgttcaccgccgccacagaaggtatcgccatagctggcgtcgcccaggccgatgaccgctcccggcaggccgcgccaggcggcgggcagttggtcgcggagggttgagtacagaggctgcagattgtcgggcagctcgcccatgccggtggtcgaggtcactgccaggaatgcatcgggagcaaaggcctgcacgtctgccagcgtggcacgagggttgtgccaggcatcaaaacctgcgtccttgaggattttttccgcgtggcgagcgacttcttcagccgtaccgtagaccgagccggagaggatggcgactttcatcaatctgatcctgtagttgagtgaaagcgtgggatattagcagcctgtgccaatatttcagtgcgcaccgtgcaacattcaagacttgccataaactggcagggtcaaaaccaggccagggaccgctctatgattaacgccaaactgctgcaaatggtcgtcaatgcgtccaacgacggaatcgttgttgccgagcgcgaaggccgggaaaaaccgctgatctacgtcaaccctgccttcgaacggctgaccggctacacgctggacgagatcctctatcaggactgccgcttcctgcaggcgggggaccgcgaccaaccggccttgatcgccattcgtgatgcgctcgacagcggcggcgcctgccgagagatactgcgtaactaccgtaaggacggcacgcctttctggaacgagctatcgctttcaaccgtgtacaacgaggtcgacaagcaaacctatttcgtcggcgtgcaaaaagacgtcaccacccaagtcaaggcacagcagcgcgtcgcccaactggaagcccagttagccgagctcaaaagtgagatcgccgcactcaaggcgacgagtggaattaacaaactgtaaaaaacgcggtctttagagcgataatggctttttaatgcctcagccttgagctagatcaatgcaacgcgacacgctattgacgcaggacgagctggattttatccaggacatgcagcacaacccgcagctcaacctgcgggatgcatggtcgagcctgacggttaatggcggcgcacagattcgcgatttgctcacgcggctggccgcccacgaccaggtcaccatccaggcgcagttcgacaaccagcaactcaccttcccgttgcacctggtggaagatgagtttcatgctgtgcatttgcgcctgggcgtaccgagtatttttgaagatgggccgatgatccgcccatggcgcctggcgcttgaaacgccggtggcgctggaaaacatcaagggctaccccagcgcgctgtgggtgcacgaagtgtcattcaaaggggtgctggtagaagtgcgtggccgggtcaaaccgccaaagaccttttctttgtggttcagcccttccggctacgaacgcatcgccctgcgcggtacgctggagcgggtaaccgcccgcggcctgttcgcctatcgcctgagccaaagcgatgccgatgagatcgaacggctacgccagttcatcctgcaccaacaccgcctggtgcatccgcacgttcacgcctgagactcgggctccagatggccgctgagcagttgctgcaagcggcgcggcatcaagcgtccgtcattgcccaggcaaccaatcgacgaaccctccaggctgtgctctgccaggtccgacgcttctccagccagtaacaacgggcaatcgagggtgaaggccaggcgattgagccgcgacgccaactctgtgccaggagcgtggttggaaaacagcaccaaggcttgcggtcgggtgcgctcgcagatcagcgtcaattcatccagtggctggccaacgcccaggaccttgaccgccagcttctcgctcgacatcaacaagcccgccaccagcaactccagctcacggcactctccgccaatggctgatagcaatacccggggcgctggcgaggcacaggccatttgcaggcaccgtgcgacgcgcgagcgcaggaaattgtcgaagaacagccactcgctggcttggccaaagcggccttggtgacgtaacaactgcttccacagcgggaccaaaatgtcctggaacaccacggtcgtcgaatagacgctgaagatctggccatacaaccggtcgagctcacgatcatcaaaagcactgatggccagccgcagttgcgcctgccactggcgccactccagttcggtatcgctgcgtgacgccgtggccggttcgttggcctgtgggtcgcgcgccaaaagcttgccgactttgctcaccgccacgccccgctcgatccagtcgaggatgcggtgcacggtgtcgatatcggtgcttgagtaaagtctgtgcccactttcggtgcgtaaaggctggatcaaaccgtagcgacgctcccacgcacgcaacgtcaccgggtttacgcctgtgagtcttgccacttcacgaatcggaaacagcccctcgcagtcagtgtggctgtcgggtgtcgtttcacgaaatggcgcagtgatttcgggcatcagcggtcaagaaacttatatgaatttgaatactatttaacgccgattgatctgcatgattcaagatctgcggcgatccatccaaagtttctggcgtatttgggcaaaaccggaataatccttgcctgttcttttgcgtcgctgcaccaccccgcagcttcgtccgtgcgccgcctacccggctcggcgcacttgctgatttggagatatacgatgtctacctcacccgtcaccttgatggttgcgcgccgcgtggcaaaaggtcgctacgaagaactgatggcctggctgcgcgaaggcgagcaattggcgactgacttccccggttacctgggctccggcgtgctggccccgccacctcatgatgatgagttccagatcatctttcgctttgccgatgaaaagaccctgcacgcatgggagttctccgcttcgcgcagcacgtggctgagccgtggcagcgagctgtttgccgacccgtcggagcaccgcgtcagcggtatcgatggctggtttggtgccgtgggtgcacgcccgccacgctggaaacaggcggtagccatctggttggcatttttcccggtatcgttgctgttcaacttcggcctggggccgctgctcagcgagttggacctgttcagccgcgtactggtgagcaccgcagccctgaccccgttgatggtatatctctttatcccgctgtcgacccacctgctggcgaactggctgcacccttcgccccctcgcaaagtcactgaagccgccgcttgagtacagggaggccggggcgctggtatagtttgagcctgccagcgacttgagcctcccatgaatgcaaccaacgctccgatcctgatcaccggtgccggccagcgtgtcggcctgcattgtgcccagcgcctgttggatgaaggccaatcggtgattttcagctaccgcagcgaacgccccggcgtgcaggcactgcgtgagcggggcgccatcggcgtgtttgccgacttctccagcgaagccggagtgctggctttcattggcgccgtcaaaacccatacccaaaacctgcgggcgatcatccacaacgcttccgcctgggtcgccgaaaccccgggcgacgaaagccgtgcctttatcgacatgttcagcgtgcacatgcttgcgccgtacctgatcaacctgcattgttcacctttgctgcaacgttcgacacccgccgatatcgtgcatatcagcgatgacgtggtgcgcaagggcagccggcagcacatcgcctattgcgccaccaaggccgggctcgacagcctcacgttatcgtttgccgcgcagtttgcgccgctgatcaaggtcaacggcatcgccccggcgatggtgatgttcaacgaaggcgatgacgcaacctatcgcgccaaggtcctggccaagtcggccctgggcatcgagcccgggcccgaggtgatctaccagagcgtgcgttacctgctggacaacccctatgtcaccggtaccaccctgaccgtcaacggtgggcggcatatcaagtaagccgtttttgaggatgttgtatgaccttatccctgccccaccactaccgcgaaatcctcaagggcctgggcgaagacccgcagcgcgagggcctgctcgatacgcccaagcgcgcggccaaggccatgcagtacctgtgtcatggctatgagcagaatctggaggagatcgtcaacggcgcgctgttcgcgtcagacaatgacgagatggtgatcctcaaggacatcgagttgtactcgttgtgcgagcatcacctgctgccctttattggcaaggcccatgtggcctatattccgaccggcaaggtgctgggcctgtcaaaactggcgcgcattgtcgatatgttcgccaggcgcctgcagatccaggagaacctcacgcggcaaatcgccgatgccatccaggacgtgacccaggccgccggcgtggcggtggtgatcgaagccaagcacatgtgcatgatgatgcgcggcgtggagaaacagaattcaaccatgaacacctcggtgatgctcggcgcctttcgcgagtcgaacaccacccgcatggagttcctgcaactgattggacggagcaagtagcaatgccacaacttcaaccaggcatggcgcgtatccgggtcaaggacctgtgcctgcgcacctttatcggcatcaacgaggacgagatcctcaacaagcaggatgtgctgatcaacctgaccatcctgtatgccgcccaggaagccgtgcgtgacaacgacatcgaccacgccctgaactaccgcaccatcaccaaggccatcatcgctcacgtcgaaggcaatcgctttgccctgctggagcgcctgacccaggaattgctggacctggtgatgagcaacgaatcggtgctgtacgccgaagtcgaagtagacaaaccccacgcgctgcgttttgccgagtcggtttcgatcactctggccgccagccgctgatagcaagtgagccctatgaacgaccaacaacgcctcgaactcgaagccgccgcctttcgccgactggtagcccacctggacagccgcaaggatgtgcagaacatcgacctgatgaaccttgccggcttctgccgcaactgcctgtccaagtggtacaaggccgaagccgacgaacgccagatcgagctcagcctcgatgacgcccgtgaagtggtgtacggcatgccgtacgccgagtggaaagcccaataccagcaagaagccaacgccgaccaacaggccgcgtttgccaaaggtaagcctcatgattgatttgaacaccctgcgcgccagcctcaacagcggcgaacacgtttttgccgacacgttggcatttgtcgctgccggttatgactaccagccgcaagctttcaccaacggcggtgtggaaaacgctgccgggcagaacgaaggttcgtgcaagaccctgggtttggcgctgctggaagggttgagtgataaggaagcactgctggcgtttggtgagcattaccggtcggtggtggcgacgcctgagggcagtgaccatggcaatatccgagcgttgattgcccatgggttggccgcagtgaaatttgctgaacagcctctgacccgccgctgatttcataaccaaccccgctcaatgtgggagccgggcttgcccgcgatggcggtggtgactatcacaccgctatcgcaggcaagccagctcccacatttgtttagcggagtaggttagatcgcaccataaaaaaaccggctttcgccggttttttttagtcagcgggtttagaacgaagcgtccttcaaaccgtcgaggtaacgctcggcatccagggccgccatgcaaccggcgccggccgaggtgatggcctggcggtaaacgtggtctgccacgtcgcccgcagcgaagataccttcgatgttggtcgcggtcgcattgccttcacggccgccttgcaccaccaggtacccgtctttggcttccagcacgccttcgaacagcgaggtgttcggggtgtggccgatggcgatgaacacgccgtcgactttcagctcgtcgaagctgccgtcgttgtttttcaggcgggcaccggtcacacccatgttgtcgcccaggacttcatccagggtggcgttgagcttgaggatgatcttgccttcggcgacacgggcgtgcagcttgtcgatcaggatcttctcggcgcggaaggtctcgcggcggtgaaccagggtcacggtgctggcgatgttggccaggtacagcgcctcttcaacggcagtgttgccaccgccgaccacggcaaccggcttgttgcggtagaagaaaccatcgcaggtggcgcaggccgaaacgcccttgcccatgaacgcttcttccgacggcaggcccaggtaacgagcactggcgccggtggcgatgatcagcgcatcgcaggtgtacacaccgctgtcaccggtcaggctataaggctttttcgagaagtcgaccttgttgatatggtcgaagacgatctcggtttcaaagcgctcggcgtgctctttcatacgctccatcagcaccgggccggtcaagccgtggacatcgccaggccagttgtcgacttcagtagtggtggtcaactgaccgcccgcctgcatgccggtgatcagcagcggcttgagattggcccgggcagcgtagacagcggcgctgtaaccggcagggccggaaccgagaataatcactcgggaatgacgggtatcagacatgactcactcctaccgaccgcccagaccacagggcggcgggaataaaaaaggacggcgaagcacttggggaaggctttgactcgccaggtcctgaaaaataatgggtgcagcgtatcgaggggggcaagattaaggaaatacgcattaacaatccagctcataggtgttctctatgcgcgcgattgagttaatcgacccctttgtaaccctggatgtcgcctacctgccggagctttcacatcaggtgcaaagccggtaaggtcggcgcgttcgccattttgctcggagtattccatgcccgcccctgccctttctggcccgcaatacctacgtgaaggcctcaaactggtgttgagccctggcctgcgcctgttcgtgttgctaccgttggcgatcaacctggtgctgttcgtcgggttgatctattttgccggccatcagttcagcctgtgggtcgatagcttgatgccgacgctgccccactggctaggttttttgaattacctgttgtggccgctgtttgtggtgctggtggtgctgatggtgtttttcaccttcaccatgctcgccaatatcatcgccgcaccgttcaacgggtttctcgccgagaaggttgaggtcgtggtacgtggcaccgatgacttcccgccgttcagttgggctgaactggccgctatggttccgcgcaccctggcgcgggagatgcgcaagctgggttatttcctgccacgtgccatcggcctgtttatcctgtcgttcatcccagtggtcaacctgatcgcggcgccgttgtggctgttgtttggcgtgtggatgatggcgatccagtacatcgactacccggccgacaaccacaagctgggctggaacgaaatgctctcctggctgcgccagaagcgctggcagagcatgagctttggcggcattgtttacctggtgctgctggtgccggtggtcaacctgttaatgatgccagcggcggtggccggggcgacgttgttctgggtgcgtgagcaaggcgccgaagcgatggcgcagcaagcggtggtcaagtcataaatccatcatcgcactgacacaatggcgacatggcccacgccgacactgtgggtcatgacgacagcctcgcttcacatcaccctcattaccgaaaccttcccgccggaaatcaacggggtggccaatacccttggccgcctgtgcgagggcttgcgctcacgcggccatcaggtcgagctggtacgcccacgccagagtgccgaccaaagccgccccagcgacgatgaactgctgctgtgccgcggctggccactgccgggctacccagggctgcaatggggccaatcgtcaatgcgtaagttattgcgacgctggacgcgccagcgccccgatgtgctgtatatcgccacggaggggccgctggggctctcggcgttgcgcgccgcacggcgcttgggcatcagcgtggtcagcggctttcataccaatttccagcagtattcgaaccagtatggcttgagcctgttgagccgcgtggtcacccattacctgcgctggtttcataaccgctcaagcctgaccctggtgccaagtgccagccagcgcctggagttggagcgccggcattttgagcgcctggacctgttgtcccggggggtcgacagccaattgttccacccggccaagcgcgataacacactacgtgaaagctgggggttgagcagtaaccagatcgccgtactgcatgtcgggcgactggcccaggaaaagaatctgggcttgctcaaacgctgcttcgacaccctgcaggacaggtacccgctacgccagatgaaactgatcgtcgtcggcgatggcccgcagcgggccatgatggagaaggacctgcccgaagcggttttctgcggtgccttgcgcggtgaggaactggcgcggcactacgcatccggcgatatgttcctgttccccagcctgaccgaaaccttcggcaacgtggtattggaagccatggcgtcggggcttggagtagtagcttatgaccaggctgccgcaagccagcatctacgccacggctacaacggcgtgctggcgatgccaggggatgagcgtgcgttttgcgaggccgccaactggctactggaggatgcagaaggtttacgccgtatgcgactgaacgcccgccagcatgccagccgccagggctggccggcgattatcgagcaattcgagcagcagttacgcggtgtgtgtgcgcagcgttatgccctctcagcgcaaccttacgtgccttgaaggcgtatttcgcaacaggcagggaagcgcctggggtacgccctttaagttttgcctaatatttaaaataggaaccagcagccgtgcggtgccaatcagtagcacctgcaatagagcaggcctttcaacgaatagagagaccgcgcaatggcaatttatggaatgggtgtacgcaatggcgtgaacatgccaacggcacaatggacccaacagcaacaatggctggatcaatcccgcgcagagccgtcaacttacggccagccagggcataaagacgcactcaagactgatcacagcaaagagctgaacaagcgcccagagtattaatcactgaggcgaagtgctccctgtgaccctcacagggagcacttcccttacaccagcgttgtcagcgcctcacgactgaagggcaagatgtcaccctcgcgcccttcgcgtaccttcacggcccaatccgggtccaccagcagcgcacggcctacggccacgaggtcgaactcatcgttgttcaggcgctccagcagtttctccaggctggcaggctgggcgaccttgtcggtgttgaccatgaactgcaggaactcgccatccaggcccacgctgcccacggtgatggttggcttgccggtgagctgacgcgtccagccggccaggttgaggtcggagccttcaaattccggctcccagaaacggcgagtggagcagtggaaaatatccacgccagcgtcagccagtggcttgaggaactcacccaacgcttcaggggtttgtaccaggcgcgcggtgtagtcttgctgcttccactgggagaaacgcaagatgatcggaaagtccgggccgacagcggcgcgggccgcctggatcagttcaatggcaaagcgcgaacggttggccaggctgccaccgtattcgtccgtgcgctggttgctgccttcccagaaaaactggtcgacgaggtagccgtgggcaccgtggatttccacgccgtccatgccgatggcctgggcatccttggcggcttgggcgaaggcgttgatcacctccttgatgtcctgtttggtcatgccgtgcacaacgacattgccgtccttgagcttttccatcgggccataagccggcacactggcgtcaggctcggtgccgatacggcgcacactgcccacatgccacagctgcgggacaatcttgccgccttcagcgtggaccgcatcgaccactttcttccagccagccaaggcggcttcaccgtaaaaatgcggcacgttggggtagccgttggaggctgaatgatcgaccaccgtgccttcagtgatgatcaagcccacaccggcagcggcacggcgacggtagtactcgatgactttggagttgggtacgccacctggggagaacgaacgggtcatgggcgccatgaccacgcgggtcgacagttgcaatgcaccgagctggaagggtttgaacaaggcttggacgggcatggaacgctccacggcaaagaaatttatgacgtggataatatgcagaccacagcgccactcatagcactattgatctaaatgattaaggtacagaagcacccgaatacctgtaggagcgagcttgttcgcgaagcacctgaggacgtcgcgtatttaaggaagcgcgcgttatcgttggcgtttttcgcgagcaagctcgctcctacagcggatgggagtcagctcagggctttttcgatggcctggatgatggagggatcttctgggggcgtacggggtgagaagcgcgcaagtacgcggccatctttacctaacaggaatttctcgaagttccaggtgatatccccggggaattcagcgccctcgcccgccagcaagcggtacaactggtgccgatcagggccgttgacgtcgatcttgctgcccagtggaaaggtcacgccatagttcaggctacagaactcgcggatttcttcctcgctgcccggttcctgaccggcaaactgattgcacggcaagccgagcaccgtaaacccttggcccttgtactgctggtagaggttctccaacgccgcgtattgcggggtcaaaccacatttggacgccacattgaccaccagcacgacttggcccttgaaaggcgccagcggtagcgcttgtccgtccaaggctttgagtttcagatcgtggaaagcactcatgacgaactccagatatcccatgttctttgcattgcagcccttcggagcttacaaccggcaaagctgcaatcatagacgccgatgacgaaactcgcctgcaggttactgagcggtcggccagggcaaaatcggaatcgccgtcaccgcattctgcgggctgccttcgatcaggcggtcgctgtagaccagatacaccaaggtgttgcgcttcttgtcgaggaaacgcacgacctgcatggtcttgaacaccagagaggtgcgctccttgaacacttcgtcgccgtccttgagctcacccttgaagtggatcgggcccacctggcggcaggcgatcgaggcttcggcacggtcttcggccaggcccaggccgccctttacgccgccggtcttggcgcgggacaggtagcacgtcacgccatcgaccttggggtcgtcaaacgcttcgaccacaatccgatcgttggggccgacgaacttgaacaccgtcgacacctggccgacctcttcggccgaggccagcagtggcatggccaacagcaggccgagcaatcccttcatcacgcgcatcgtgtatttcctatggttagaccaggatcaggttgtcgcggtgaaccagttccggttctgccatataacccaagagtccgacaatggcgtcggagggttgtccgataatcttctgtgcttccagggcgctgtagttggccaggccgcgcgcaatctcgcgaccgtctggcgcaacgcacaccaccatctcgccacggcggaagctgccctgcaccaacttcacacccaccggcagcaggctcttgttgccctgggacaacgccgctactgcgcctgcgtccagcaccagggtgccacgggtttgcagatgaccggccagccattgcttgcgcgccgccagcatgccgcgctccggcgaaagcaacgtaccgatgcgctcaccggccttgaggcgatcgagcacgcgctccaggcgcccgccgacgatgatggtgtgggcccccgaacgcgcggccaggcgcgcagcgcgcagcttggtctgcatgccaccgcgacccagggcaccgccgacactgccggcgaccgcatccagcgccgggtcatcggcgcgggcttcatagataagctgggcatcggggttgttgcgcgggtcggcgtcgaacatgccatcgcggtcggtgaggatcaccaacaggtcggcctctaccaggttagccaccagggcggccagggtgtcgttgtcaccgaagcggatttcgtcggtgaccacggtgtcgttctcgttgatgaccgggatgaccttgagctccaccagcgcgcgcaaggtgctgcgggcgttgaggtagcgcttgcggtcggacaggtcgtcgtgggtcagcagcacctgcgccgtgtggcggccgtgctcggcaaagctggactcccaggcttgcaccaggcccatctggccgatggcggcagcggcttgcagttcgtgcatcgcgctgggtcgcgcggtccagccgagacggctcatcccggcggcaaccgctccggacgacaccaataccaactcaacgcctgcctcatgcaaggccaccatctgctcgacccagacgctcatggctgcgcgatccagacctttgccatccgccgtcaacagcgcactgccgattttcacgacccagcgctgcgcacctgtcactttgctccgcatcatcttcaaccttagagtgagggccgcgcgacccagcgctgcccataacgttatacccggataccaaaacgccgctccagggagcggcgttcaagtttatcgcaacggatcagtcacgcacgtaaatgatttccggaccgtcttcatcatccacgtcttcttcgtcccaatcatcgtcgccgatgtcgtggaccgacttcacgccgctgcggcgcagggcgcgctggtcgtccagggcctgcaactgggcgcgggcttcgtcttcgatctgctggtcgagctcggcgagttcggccttgtacaccgggtcggccgccaggcggtcggcacggtcttccaggtaacgcatgatgtcgcgggtcaggcgctcggtgccttctttggcgatggccgagatgacgtagaccggaccttcccactccaggcgatcaacgatctccttgacgcgctcttcgtgctcttcttccaggatctggtcgcacttgttcagtaccaaccagcgatcgcgctcggccagggccgggctgaacttggtcagttcgctgacgatgacttcggcggcatcggcggcactggtgtcatccagcggcgccatatcgacgaggtgcagcagcaaacgggtgcgggacaagtgcttgaggaagcggatacccaggcctgcgccgtcggaagcgccttcgatcaggccaggaatgtcggcaaccacgaagcttttccagcggtctacgctgaccacacccaggtttggcaccagggtcgtgaacgggtagtcggcaactttcggcttggcggccgataccgagcgaatgaaggtacttttacccgcgttcggcaggcccagtaggcccacgtccgccagtactttcatttccagcttgaggtcacgctgctcgccgggcttgcccggcgtggtctggcgcggtgcacggttggtactggacttgaagcgggtgttacccagaccgtgccagccgccctgcacaaccatcagtttctggccggccttggtcaggtcgccaattacttcctgggtcgcggagtcgatgatcgtggtgccgaccggtacgcgcagtaccaggtcttcaccttttttaccggtgcagtcggtgctgccgccgttggagccacgctcggcatcgaagtgccgggtgtaacggtagtcgaccagagtgttgaggttctcgtcggccatcatgtagatggaaccgccgtcaccgccgtcaccgccgttcgggccaccgttttcgatgaatttttcgcgacggaaactcatgcaaccgttaccgccgtcgcctgcttttactcggatggaaacttcatcaacgaacttcataacaaaacgcctctcgccgcatggacgagcttaagaaaccaagacataagactcttgcaaaaatgagcgcagcgacctcaatcagcgaccgcaaaccagcgcctgagctcatcacagacagctttgcaagagactcactccacaaacgaaaaagccccgtcgcaagacagggcttttccagcgatctcgcaattaagctgcgacaacgctcacgtaacggcggttgaacgcgccctttacttcgaacttgatcacgccttcgattttagcgaagagggtgtgatctttacccatgccaacaccgtaaccggcgtggaattgggtgccgcgctgacgcacgatgatgttgcccggaatgattttctggccgccatacatcttcacgccaaggcgtttggcttctgagtcgcgaccgttacgggtactaccaccagcttttttgtgtgccatgagtcaattctcctagtgaggaattaggctgaaattaagcctgaataccggtgattttgatctcggtgtaccactggcggtggcccatacgcttcatgtggtgcttacgacgacggaacttgatgatgcggactttatcgtgacgaccttgggagatcacttcagccacaacggtagcgccagcaacaactggagcgccgatgttcacgtcatcgccattggcgaccaacagaacgcgatcaaaagtaacggattcgccagtagcgacttccagtttctcgatcttcaggtattcacctggggcgactttgtattgcttgccaccagtaacaattactgcgtacgacatggtatttctccgataatcctgctcacccagcgctttataagaagaggtattggctggcatggctgcatgggatggacgtccctaatgcaattgcgtaaggcaggtgctgcccaggaagttcagggtgcgcgattgtacgcaaggtaaagaggtgttgcaaggggccgtctatcgcgccttgacactgcggggtgagggtcctagcatgccgcgcaacccttctggagcgactgtcgctgatgcaaccccaagctttctaccgcgcggtcgcggacgattttagcgccgtcgacggcatcatcaagcagcagctgacgtctaaagtgccgctggtctccaaaattggcgactacattacgtcggcgggcggcaaacgcctgcgtcctttattagtgttgctgtgcggcaaggccctgggccgtcaaggcgacgacctgcgcctgctggctgccaccatcgaattcctgcacaccgccaccctgctgcatgacgacgtggtcgacatgtccggcatgcgccgtggtcgcgagaccgcaaacgcgatgtggggcaacgcgcccagcgtgttggtgggcgacttcctgtattcgcgttcgttcgaaatgatggtcgagctgggctcgatgcccgtgatgaagattctttcacaggccacacgcatcatcgccgaaggcgaagtgttgcagttgtccaaagtccgcgacgccagcaccaccgaagaaacctatatggaagtgattcgcggcaaaaccgcgatgctcttcgaagcctctacccacagtgccgccgcgctgtgtggcgccaccgccgaacaggccgaggccctacgcacgttcggtgaccacctgggcgtggcgttccaactggtggatgacctgctcgattacaagggcgacgccgaaaccctgggcaagaacgtcggtgacgacctggccgagggcaagccgaccttgccgctgatctacaccatgcgcgaaggcacgccggaacaggccgctctggtgcgcaaggcgatccagaaaggcgggatcgaagacctggaagccatccgtgccgccgtggaagcctcgggttccctggagtacaccgcgcaactggcgcgtgactacgtggcccgtgcgattacgtgtctggaagccctgccggccagtgaataccgggatgccctggttgagctgagtgagtttgcggtcgcccgtactcactgattccgcgctgtttaatgtgggagctggcttgcctgcgataactagagtgaattcactgccactatcgcaggcaagccagctcccacattaggacgagtccaaccccatccgcgtttaaaaccctatataatgtgcgacttttagccatccctgactttctaggagctttagtgagcacgttgcctccctgccccaaatgcaattccgaatacacctacgaagacggcgcccagctgatctgcccggaatgcgcccatgaatggtccgccactggcgaggccgaagtggttggcgatgaaaccgtgaagaaagactctgtgggcaacgtcctgcaggacggcgacaccatcacagtgatcaaagacctcaaggtcaagggcacttccctggtggtcaaagtcggcaccaaggtcaagaacatccgcctgtgcgacggcgaccacgatatcgattgcaagatcgacggtatcggccctatgaagctcaagtccgagttcgtgcgcaaagtctgatcctgctgcattccatcccgcgcccgccgcggggtggcgttttgccctctgcgttgatcgaacgcaatacccacacagaaaaaaacagaaactgccaatagacgcttgctattctacgaataagaattattctcattgaaacccatcaaggagaacgaccatgacttatttgatagatgcctggctggatcgccctcacccttacctgcgaatcctgcatcgggaaaccggtgaagtctgtgcggtgcttgaagaagaagcgctgaacgagctgcaggaccagggcgatctggacgtcaatggcctgagttccagtgagcctggggtgctgaaggaagtggtgaggaatctgtttctgttctgctatgcacgagcgttgcgcccggcgacggagcttaatggcaagttccatccatgaagaaactggcaaatgcctgttggggcgaacgcgttcgtcccaacaggtaaccagcgggtcttacagaacgtcgagcagctcgacgtcgaataccagaacgctgtgcggcgggatgctgccaacgccttgagcgccgtaagccagttcgctcggcacgtacaggcgccatttgctgccggcattcatcagttgcagggcttcggtccagccggcgatcacgccgccaaccgggaattctgcaggctggccgcgctcgtaggagctgtcgaacacagtgccgtcgatcagggtgccgtggtagtgagtacgcacttggtcttcacgggtcggcttggcgccggtaccagccgtcagcacttcaaattgcaggccggaagccagggtggtgatgccatcacgcttggcgttttccgccaggaaagccaggccagcgcctgctgcagcttcagccttggcagcggcttcggcttgcatgatttcacggatcactttgaagctggccgccatttgctcttggtcaacacggctaggcttgcctgcgaacgcgtcggtcaggccggccaggatcgcgtccaggctgacgcccggtggcgggttgtcacgcagttggtcgcccaactgacggccgataccgtagctgacgcgggtttcgtcggtggacagattaacttcggacatgaagaggctccgctgtaggacgccacagtttcccgcgccgcccagaactaaaagggcccgcagactagcacacatgagcgggccgtgatcagccccaccccggctaccaaagcgccagatcataggtcaggtacaaccggtagttgtcccggtcactggcataggttgagcgataagtggccttgcgcacctccacacccaggcctttgaaggtgctgtcctgaaccacgtaccgcagattcgtgtcggattcccactcccgtgcctcacgccctttgaagtcgccgttttgccctttgtagtagcgggtcatgaaactcaagccaggcagtaccgccgccaagtcatagtcgtagcgcagcatccaggtttgctcacccgcctggatgaacttgcccacacccgcgttactaaaggaatacaacgtcgacacacttgcatatggcaacgccgtctcgccactgactttctgatagcccacacccagcgcctgcgcacccaggcgataggtaaacaggccgctgaacatgtcactgtcgactgcaccgttacgtgcctcaccggcttcactgctgatgaaatagcgcaagtcgctggtcagcgtgccccggcccaacggctgcttatgcacaaggccgaagaattgctggcggtagaattcgcgcatttcgccgtagtaccacgtgccactgagctttggcgtaaaggcgtaggtggcgccagcgaaatcgaagtcactgcccttcttgccactgtagccctggggataaatatccacgctgtcggtggagttacgcagcttgaatttatccaggtgcccggcgtgcaggtacaggtcgtgaatgccggtgtattccacttgagtgccctggaaggtctgcggcaacaggcggccatcgttgtgcaccagcaccgggatctttggcagcaacgtaccggttttcaccaccgcgtcgccccagcgcagcttggccgtgactcccaggctggaaaactcgctggccgcatgaccatcgtcatgcaccggcagcaaacccgtgccggcgtgggtcgggctggagtccagacgcaagcccgccagccccagggcatccaggccaaacccaacagtgccctcggtataacctgactgcagattgagcagaaagccttgggcccactccttgcggtcttcgcccccgtcgcggtagccgtcgttgaagtagaagttacgcaaggtcaatcggccttgggaatcctcccagaacccctgggccattactgcaggcgacaagctcgctagcaaccccgcggagactattccccccctcgtgaaaaaatcacgcataaaccgttcctcaatgccgtgttgtgtttttttatgggcagttgcgcaggcgcgacaggctggacggcatgtcgcgttgcagcggacactaacggctcatcaactgccccacaacgttatgcgagaagcgcatcaggctatgcgtgaagcacccgccgcccttgccaaccgacaggaagaacacggtgaatctcaagcaactcgaagctttcaaagcgatcatgtctaccggctcgaccatcggtgccgcgacacgcatgggcctctcgcaatcggcagtcagccgcctgctgagccagttggaagagcatgtgggttttgccctgttcctgcgcaagaaaggccgcctgatggccacgccagaggccgaggaactgctcaccgaagtcgccggactggtcgatgggatgcagcgtatccagcgcctggctgacgagatgcgcgtgggccgctcacgcaaaagcctgctcaaggtcgcggtacccaccagcatgacccaggagctgttgccacgcatcgtggcgcagtttctcaaggagcatgacgacattgtcgtggaactgctgaccggttcttacgacacgatcgagcgtgcggtgctggaccgttccgccgacctgggctttgtacgcctgcccacggaaatacctgacttcgatgtcgagccggtgctacaaaccgaaggcgtctgcgtgatgcccgccgaccatccgctgacccgtcacgcctgcatccaagtgcagcacctgcgcgatgtgccgttggtgatgctcggccggcaacgcgcattgcgggccgagctgaaccaggtgtttcgtgccgccaacctcacaccgcaggtgcgggtcgaggtgcactcggtcggggcagcgtgcagcttcgttgccgagggcctgggggtgtcgatcgtcaatggtctgctggccagccacttccggcatttgcccatcgtcacccgcccgtttcgcccggcgctgccctacgcattcggcctggcgtttcgcgccaatgagccgcgctcgcaactggtacacgcgtttgccgagcacctcaagcagggtctggccgcacaaaacgcatagcccaacccaccccacgcataacgttgtcgccgcgaaaactttgccctagtgtccgccccacacgtgtcacccctataacaataacggcgcacgccggggccactagcatgagcgaatcccagagcatccctacccaagcagtggtgggaaataccacgcaacgcaagcagatcaatcccgccatcatcctgctgagcatcgtcctgctcgcagtggcgtttacctacgcggtgaactcgggcacgttccagcgccagaatggcctggtgataccgggctcttaccaggtgctggaaaaacacgactccctgggccaactgttcagcctggagccgcgcaaagccggcgacaccgtggcccgcccggtgtccttggtggaaggtttcatggccattccccagggcatcgagaaacgtgcggcgctgattttcatggtgctgttcatcggtggcatgttcggggtgctgaacaaggccggagtgatcgacgccgggctggaacgcatgctgggcctgacccggggcaatatctatgtactggtgccatgcctgatgctggtgttttccgccggcagtaccttcatggggctggccaaggaatttatcctcatcgtgccgttgatggttgccatggctaatcggctggggctatcgaacctgatcgggctggccatcgtcacgatctcggtgaagatcggctacctggcttctatttccaatcccgtggcgctgtccgtggcgcagccgatggtcgggctgccgatcttcagtggcctgagcatgcgtgtgctcgcctactgcagcttcctgctggtgggcattgccttcgtgctgtggagtattcgcaagcacggttacgatgccacggcgcagatcactttcgaaagtacgccgttgcccctgcgccatctgatcaacctgatcgtactgctgacgggcatcgctttcctggtctacgcctccaaccgctggggctggaaataccatgaactgtcggcgttctacctgctgctgacgctggccttcagtgtgatcgccgggctcggcgcgagcactactgccagtgcctttgtcgatggcatgaagaaggtgctgatcgctggcgtgttgatcggcctggccaccgccgtagagatcatcctcagtaccggccaagtactggacaccatcgtcaacagcctggccaacctggtgggcgaccacggcccgatagtgtcggcctatggcatgttcttcgcgcaactggggctcgatgtactgattccctctacctctggccaggcggcagtgaccatgccgattttcgggcccttgggccagttgtccggcgtcagcccgcagaccacggtgttcgcctttttgctaggcaacggcctgaccaacatgatcacccccacctccagcggcctgctggtactgctggccaccgccaatgtcggctggggccagtgggcgcgctacatcctgccactgttcctgatctacgccgtgctggcgatggtgttgctggccattgcggtgacgagcgggtactgaatcgatgagtgttatctgcatgcaaattctgcctgaccaaatgatcccgatgcgtgacggcatccacctggccaccgatatctacctgccagcgggcggcaaagggccgtttccggtggtgatcgaacgcacgccctacgacaaaagcaagccctcgcgctcggaaaaacagctcgacggccaacacatctcccgtgcacaaatggccgcacggtttaccgagcaaggctttgtcgcgatcttccaggactgccgtgggcgctacgcctccgaaggcacgttcaccaaatacacggccgagggtgaggacggtttcgacaccctggcctggatcgtccaacagccctggtgcaacggcaggatcggcagcatgggcctgtcctacgcggcccacacgcagttggcgatggcctgcctgcacccaccggggctgagcagcatggtgctcgacagcggcggcttcgccaacgcctaccagtgcgggattcgccagggcggcgccttcgaactcaaacaggcgacgtgggcctttcgccaggccaaggaaagcccagcggccctggacgacccgctgattcgccaagcgttggagcaggaggatattcatcaatggttcacacgtatgccctggcaacccgggcaatcacccctgcgccatgtgccggaatatgaagcctacgtgctggagcaatgggcccagggcaccttcagtgaatattggcaacagtcggggatctacgccgaaggccattacgcgcgactgcccgatataccggtgctgttcatgtccagttggtacgacgcctacgtcagttcaaccctggccaactaccgcgccttcacccagaacggcactgcccgccagcggttggtgatgggcccatggctgcatggcgaccgcaatatcagccacagcggcgatgtggagttcggccagcaagccaccttcgatgggcaggtcgatcaggattggctcagttgccgcctggcgtggttcgagcattccctcaaaccatcgcctcacaccacgacggccagcgtgcaggtgttcctgatgggcggtggcagcggtaaccgcgatgagaacggacgtttgcagcatggcggccgctggctgcacaccacgcaatggccactccccggcagccagacattgaccctctacctgaatgcacacaggcagttgagccgcacggcacctgtcgaggctgacgcccacttgagttaccgcgccgaccccgcccacccggtcccgaccatcggcggcgcgctgacctccggcgcccctgtgtttgttggcggggccttcgaccaacgggagcgtcccgactttttcggcacccaaggggataaccgccccctggctcagcgcgatgacgttctggtgttccagaccgagcctctggacgacgacctgatcgtcgccggtgacgtgcagatcgagctgtggatcgacagcgatgctcccgacaccgacttcaccgccaagctggtggacgtgtacccgcccagcgccgactaccccgagggctttgcgatgaacatcaccgacggcatccgccgctgccgttatcgcgactcatgggaacagccgacggccctggagcccggcgaacgggtcaaggtgctgatcgaacctttcgccacctgcaacctgttcaagcgcggccatcggttgcgcctggatatcgccagcagcaacttcccgcgctttgacgtcaaccccaacagcggcgaaccttcaggccaagccagccaccctcgggttgcccacaatagggtgcacctgagccacgccgccgcctcctgcctcaggcttaccgtggtgcccaacacggcggagtcctgagcgcatcggatcgccattgctgcacggtaatggcgacccttcgtcaccccgcaagaaaagtacttcagaatcatcctttgccgccgatacagccctacacatcttggctggctcaaacaacaacacaccgtccagcagacagacatcactcttcaaggagctttcgatgaacagctggttcggtaacatcagtgtcaatctcaaactcggcctgggcttcggtctggtgttggtcctcacttcagtcctcgcactcacgggctggaccagcctgggcggcttgatcgaccgtagcaattggatgagcgatatcactcagctcaacgcctcgttgaccaagctgcgtatcgtgcgcttgcaatacatgctggccaatggcgacgaggccgtggcgcagaatgtgcagaccagcctggatgccttcgcagctcaacaacagaaattgctggacagcttcaagagcccggaaaacctcaagctgctcaatgagcagaaagccgtcattaccgcttaccgccagtccctgaacaaaatgcgcgaggcctatcgcaatggcaacgctgcgcgcgacgtcatgggcgccaaggcagacatcgccaacgcacagatcaatgcgctggaaaccagtgtgcagcagtcacccgacagcccggagcgcttcacgcagttcctggccgtgacccaggccaagaacgaattcctgcaggctcgctacgaggtgcgcggctataccaatagccccaacgcagaaaccgaagcccgcgctgctacacagctggaaaaagctgtcgccggtttgaaaggcctcagcgttgccttcggtgccggtcagcaaagcgcattgtccgcactggaaaccgcgcttggcgcctatcgcagtgcggtgcagagctacaaggcggccaacgccaatatcgtcaccgcccgtgccgaaatgactacccagggcgccgacatcgtgacaatcagcgacaagctgtacgacatccaactggaacgtcgcgacgctgaaagcacccaggcccgtagcctccagttgatcagcaccttgctggcactgttggtcggcgtgattgccgcgtgggtaatcacgcgccagatcacccgtccgatccaggagacgctggccgtagtggaacgcatcgcttcgggcgacctgagccacaacatccaggtgacccgtcgtgacgaactgggcgtgttgcagcaaggcatccagcgcatgggcaccaccttgcgcgagctgatcagcggcattcgcgacggcgtcactcagatcgccagcgccgccgaagagttgtcagcggtgaccgagcagaccagcgccggcgtgaacagccagaagatcgagaccgaccaggtcgctaccgccatgcatgaaatgaccgccactgtgcaagaagttgcgcgcaatgccgagcaggcctcccaagccgcttccgacgctgacggccaggcccgcgaaggcgataaagtggtggctgaagccatcgcccagatcgaacgcctggcggccgaagtggcgcgctccaccgacgccatgacgcacctgcaacaagagagcaacaagatcggcagcgtgatggacgtgatcaaggccgtggccgaacagaccaacttgctggcacttaacgccgccattgaagctgcgcgtgccggggaagccggtcgaggctttgccgtggtcgccgacgaagtgcgtggcctggcgcaacgtacacagaagtccaccgaagaaatcgaaggcctggtggccggcttgcagaacggcacccaacaagtcgccagcgtgatgaacaacagccgcagcctcaccgacagcagtgtcgaactgacgcgcaaggccggggtatccctggaaaacatcacccgcaccgtgtcgaatatccagtcgatgaaccagcagattgcagcggccgccgaacagcaaagcgccgtggcggaagagatcagccgcagtatcgtgaatgtgcgggacgtgtccgagcagaccgcgactgccagtgatgagacggccaagtcgagtgtggagctggcacggttgggtagccagttgcagcagatggtcagtcatttccgggtttaaaaaaccaaaaaaagccgcctcaatttaagccgaggcggctccacttctcagaccttattggtcatcaaagctgtcccgcaggaatgtccacacgtgataaacacgtaaagcattcactacgaggttccacgtacgtcgtgcaaacttagacatactcggccctcctagagttgggccttacctccagcgcacttaccggaacacgtgagcctttggacgcgggtcaatgcgtcctttgaggtggccgggctagtgggccttccgcatcaatccggcacggattactagcccgtggcggtcagtccagaattcgcgcgcgtacccggcccccccaaaagcgacaaacgcagaacggggaagatcctaaccaacattcccgtctaaggtgtgtctaacagtggtcaaatatccagtatcgccgatagattcattgcaagcttttgcagtcaaaatcaggcaagagaaagatgcctaaaggatccatgccggccatcgttccgtcttgcgtgacgacgtgaccggcagttagtatccacctgcgggtcaatgcgtcctttgagatagcaaaccccagccactcactgggtttgcaataaaaaaccgccctactaaggcggtttttttttgcctgccatttacccttcagacctcgctgtcctcgacaaacaccagccgatttccaaacgggtcacggatgctcatttcccgcgaaccccagggcgtgtcctcaaccccaggcttggcatatcggtactctttgcccagcaactgctgctgatacgcatcgaccccttgggcctgaattcgcacagccgcccccggcgaagcatcaccatgatgctcggacaaatgcagcacgcattcccccagcgagacctgaaggtacaacgggaaattcgcttcgaaacgatgctgccaatcgaccttgaaccccaggaagtcgacgtagaactccaaggctttgacctcgtcgaaaatccgcagaatggggacgacttttcctaagtgcatggcgacagctccgtataaaagaagccccactatagagccgtaaacccaccacgcaaatccccgctacgcgccaggaaccggcctgctctcgcgccgttcgcctgcccatcgcgatagctcaatacgccattgacccacacgccatcaatcccttcagctgcgcgctgcggtgcggtgaaatccgccacatcccgcacccgcagggggtcgaacaacaccaggtcagcccagtagccttcacggatctcgccacgctcggccagcccaaaacgcgccgccgacaagccggtcatcttgtgcaccgccgtgtgcaaagggaacaaaccgacatcccgactgaaatgcccgagtacccgtgggaaggccccccacaagcgtggatgaggaaacgggtcttcaggcaagccgtccgagcccaccatcgacaacggatgcgcgaggatgcgccgaacgtcggcctcatccatcccgtaatacaccgcccctgccggctgtaaacggcgagcggcctccaacagcgaaacgttccactcgccagcgatgtcctgcaaatcgcgcccgcccatgtgcgggtgcggtgtcgaccaggtaatggtgatgcgaaacgcgtcggtcacttgcttgaggtccagagtcgaggagctggctgcataaggatagcaatcacagcccaccggatgatctttggccgccgcttccaaggccgctaacagctgtgggctgcgcccccaattaccggcgccggcgcatttaagatgggaaatgatcaccggcaccctcgcctctcggccgatcaagaacgcttcatccatcgcctccagcaccggttcgaactcgctgcgcaggtgagtggtgtagaccgcgccgtaggccgtcaactcttgggtgagttgcagcacttcatcggtctcggcgttgaacgcgctggcgtaggccaggcctgtggataaacccagggcaccggcctccaggctttcctgcaactgcacgcgcatggccgcgatttcatagggtgtggcggtgcggtgcaggtcgtccatatggttgctgcgcagcgccgtgtggccgatcaacgcggcgacgttcaccgccgggcaggctcgttgcaccgcggcgcggtagtcggcaaaccgtggataagagaacgcatcgcggctgcccagcaagttcatcgggtctggcgggtcgctgcgcaaactgaccggcgcggcgctgatgccacagttgccgacaatcaccgtggtcacgccctggctgagcttgggcagcatctgcggctggcggatcaccaccgtgtcatcgtgggtgtgcacgtcgataaagcccggcgccaatactcggccatgggcgtcgatgacctgctcggcctgggctgtggacaagtcgccaatcgtgcggatgcgccctgcgtgcacgcccacatcggcgacataccctggggtgttactgccatcgatgatcagcgcctggcgaatcaacgtgtcgtacttcatatcagtctccaagcggcaggctgccagggccgccgcggtaatcgtccagggccagtttgatccggcgcaggcgttcctggttatcgtccggcagggccagcgccaactcagtggcgagcaggtcgatagccagcagcatgccgtagcgggccgcagtaggcttgtagataaaactggtttccgccgattgcagcggcagcacgacatctgccaactgcgccaggggcgaatcggcaagggtgatggcaatgatccgcgcgtcgtagttgcgcgccagcgtcaccacttcaagtaattcaggggtcaggcccgtgagcgagcagacaatgacggcatgttcgggccccagggtcgccgccgtgacacgcatcatcaccgggtcatggctggcggcaatcggataacccagccgcaccaggcgcacctgcaactcatcgctgcacaggctcgacggcccgcccatgccgaacgcatggatcatccgcgccttgcccaacagcttgaccgcatcgccaaaactgcgctggttgaaacccgacagatgctgacgcaacgtcgcctcgatatcccccagaatctgccgatgaaacgctgactgttcaggcttgcccgccgggtccaggaagcggctgcccacgccgctggcctgggccaattgcaggcgcaaatcgcgcaagtcacggcagccgacactgcgggcgaagcgtgacaaggtggcggtacttacctcagcccgttgcgacagttcctccaggctggcggaggcggcaaagcccacatcctcaagcatcagcttggcgatacgcccttcgccggcactgaaagcgtcctggcgggcgcggatctgatagaggatgtccatgggggctccgggttacaggctcataaaaaaagggacagaccgtaggtcaggccgaaggcgaccagcgaaatcaaggtctccagtacggtccaggtcttgaaggtctggataaccgtcatattgaagtattccttgatcagccagaagccgccgtcgttcacgtgggaaaagatcaccgagcctgcaccggtcgccagcaccagcaattcagggtggggataacccaggcccaaggcgaccggcgcgactaccccggacgcggtggtcatggccaccgtggccgagccggtagcaacgcgcatcaacgcggcgaacaaccagcccatcaccagcggcgacaactggaacgcatgggccaggccgaggatttcatgggtgaccccggcatccaccaggatgcggttcaacccgcctcccgcgcccaccagcaaggtgatgctggcggtcggcgccaggcattcgttagtgaacttgaggatcgactcgcggttaaagccctgggccaggcccaaggtccagaagctcaccagggtcgccaccaacagggcgatcaccgagttaccgataaacaacaggaactggttgaacccgctgcccggcgtggaaatcacgttggcccagccgccgatcatcatcaacaccaccggcaacaggatagtgcccatggtcagcgcaaaactgggcaggcgcgtacgcggttcacgctcgataaactggcgctccagcgggttttccgctggcaagtgaatgtgcggcacgatgaatttggcgtagacgggcccggcaatgatcgccgtggggatgccaatcaggatcgcatacagcaccgtctgcccgaccgaggcgttataggcgagcaccgccatcattgccgccgggtgcggcggcaccaacgcatgcaccaccgacaggccggcgaccatcggcagcccgaccatcaggatcgacacgcccacgcgccgcgccacggtaaaggcaatcggcaccagcaacacaaagccgacctcgaaaaacagcggcagccccaccaggaatgcaatacacaccatcgcccagtgggcattgcgctcaccgaagcggttgatcagcgtgcgcgccacctgctcggcgccaccggattcggccatcatcttgccgagcatggtgcccagcgccaccaccagggcgatatgccccagggtcttgccgacacccgcctcgtacgaacccatgatggtgtccgctggcatcccggccatcagcgccaggccgatggacaccagggtaatcacgataaagggattgagtcggtagcgtgcaatcagcacgatcaatgcaatgatggcgatggcagcgtatgccaacagcccgaagcccggtaatgcggccatgcggtactcctcggaaagggtcacgtcgaataggttgtgaaactcataaatcattcccgaggaggattttcaatttttatgaaagtaattttcgcccacggataagcgctgtcgcttggggatatgcccgacgttaacggatgaaaattcgaggggtgttcttacatgaagatcagagaaggcggaaactcaaacgccgcccttgagtcatagactgcgcatccactgcccaggaaaccgctcatgattcgcaccacaattgccgccagcgtcctgctcttgtgcggcagcgcttatgccgccgacaaccctgccttgaaaaaatgcatggacagcgccaataccaccgcagacatggtcaattgcaacgccaagcaaaccaaggtgcaagacgaccgcctgaaccgcgcctacaagaccgccctcgccgcccaggaaggcgtgcgcaaacaacaactgcaagacgtgcagcgcctgtggatcaaataccgcgacgccaattgcgccttcgccggcagtgccaccggcggcacgattgatcaggtcaacggcacaggttgtgtgctggacatgacccagacccgcgctcaggaactggaagacctggtcggcccgtaatcgcgaccttgccccctgtaggagcgagcttgctcgcgaaaaacccgagaacgccgcagtgcatcagaatgcccgcgttatcgttgacgattttcgcgagcaagaactaggcgtccccctcgctcctacagaggtaaaggttcagtcgtgatgaaccttggcgcgcttgagcagctttttgcagcgctcggataaatgcagcacccgcaggtgcttgccggccttggtgtagcgctcgcgcagggtcatcagcgcggcaattgccgaatagtcgacaaagctcaggtgacggcaatccagcgtgacctgggccgggtcgttggctgggtcgaactgattcaaaaacggcgtggtcgaggcgaagaacaacgtgccgtgcagccgatagagcttgctgccatcggcctccagatgttcatcagcgtacagttcccgcgcctgctgccaggcgaagttcagcgcggcgatgacgataccgcacagcacggcggtggccaggtcggtgaacacggtgatgatcgtcaccgccataatcaccagcacatcattgagcggcaccttgttgatcacccgcaacgacgcccaggcgaaggtctgttgcgacaccacgaacatcacgcccaccaacgccgccagcggaatccgctcgatcagtggcgacagaaacagaatgaacaacagaatcatcaccccggcaaacaccccggagaaacgcccacgcccgccggagctgaggttgatcacggtttgcccgatcatcgcgcaaccgcccatgccgccgaacaggcccgagaccatattcgccgcgcccagagccacgctttcgcggtcaggataaccacgggtctcggtgatttcgtcggtgaggttgagggtcagcagggtttccaacaggccgaccatcgccatcaaaaacgcgtagggcgcgatgatgccaagggtttccagggtccaggggatctgcggcagcgcgaaggtcggcaagccaccggcaatgtgcgccatatcccccaatgtacgggtcggcaaacccagcaggtacaccgccaggcccacccccagaatcgccaccagcgcgggcggcacggcacgggtcaggcggggcaacaggtacacaatggccatggtcgccgccaccagcccggccatcacgtacagcggcgtgccgctgagccaggtttcaccgctcttgaaatgctccagttgcgccagcgcaatgatgatcgccaggccgttgacgaagccgagcatcaccgaatgcggcaccatgcgcaccagcttgcccaggcgcagcaggccgaaagcgaccatgatcaacccgccgagcaacaccgtcgccagcaaatactccacgccgtgctgcaccaccaacgcgacgatcaccactgccatcgaacctgccgcaccggacaccataccgggacggccgccgaacaatgcggtgagggtgcaaatgatgaaggcgccgtagaggcccatcagcgggttgagatgggccaccagcgcaaaggcgatgcattcgggcagcaaggcgaaagacgtggtgaggccggccagggcgtcggcgcgcagacgggtgaggttcatggagtaccagggaattgcgggggataaggcggggaatggtacggaattgcggcgggtggggctagtgaagtgtctggtccgatgcaccgagtcgcccctttcgcaggcaagccagctcccacatttgacagggttcacacctgaacaatgtgggagctggcttgcctgcgaaggccgcaccgcggtgctaagcgaacatcacaccatctcgtcgcgaatccactccaccaccgaagtgcgcttaggtgcccaccccaacaattcacgggcctgcttgccacgcactcggctattggagcccaacccgtagttggccatttcatagccccactcggcctcagcctcggccaatggccaatcctgtggcttgcccaggtttagggcttgggcaatcgccgtggtcatgtcgatgaacgccgcttcgctgctttccacaaaatagaaagtgcccggtacgttcttggtcaacgccagcagatacaaggccaccacgtcttcaatatgcacgttggaccaaatgttctgcccagggcccacatggcgcaccaccccgcttttgcgtgcctgcttgagcaagcgcggcaattgcacgctgtcacgcttcacgcccaggctgtggccgtagatcagggtgttgcagatcaccgccgaattcacgccgtcgttggcggccgcgagaatcaggttgtcgatggccacacgggcggccttgtcgacggtcggctcaggcaggttgtcttcgaagtagatgacatcgctggccttaccgcccgacgcatcccctacgatgctcgaaccgctggtatgcaggaacggcttgttcgaacctttcaaagcggccagcaaggtttgcacggcgccgcgatggtcgctgctggcggcgttgatcaccgcatcagccttctgcgcctgctcggtcaataccgttgcgtcgtcgagggtgccaatcacgggcgtgatgcccagggcggtcatttcggtggcttgttcagcgctgcgcaccaggccggtgacgtgatggccggcgttgaccaggccggtagcgatggaaccgccgataaaccctgcggcgccggtaacgaatacattcatggaggttgctcctgactgggtaagtaatgcgcccagtatccaacccacaccgctgtcgaataagcccgtgcggcccaattcactcttgcgctcagatcacgaatcagctcgcataccgcgccagcttggcctgaataaagtccagaaagcactggatgcgcaacgccaattgcgagttgcggtagaacacggcgtggatcggctggcgatagccactgttgaacgcctccagcaagggcaccaggcgtccggcgtcgaggtcttgggccgtcatgaaattggacaggcaagcaatgccctgcccttccagcgccaactgccgcaaggtttcaccactggacgcgctgacgccgggctggatcagccagcggtcaccttcgccatggcgcagcggccagtggttgagggtttcggtgtgggtgaagcccagcaaggtgtgatcagccaactcggcaacggtcgtcggcgtgccaaactgcttgaggtagccggggctggccaggatatgcagcggcgtgctgcccaaaaagcgcgcatgcagggtcgagtcggccagggcgccgatgcgaatggcgatgtcggtgctttgctccagcaggtcgatgatcaaatcatcgctgttgagctccagctggatatccgggtagaggctgcgaaactcggcgatgtacggcacgatcccatgcagcatgaacggcacggcggcgttgatacgcaggcgcccggccggttttttctggcgcgaggacaggcgctcttccagctcgtccatctgcgccaggatcaccttggcctgttcgaagaagtacttgccctcttcggtcaggtccatgcgccgcgtggtgcggttgatcaaggtggtgtcgagcttggcttccaggcgcgacaacgtgcggctgaccgccgatggcgtttgcccgactttttcggcggcggcggaaatcgagccgcactcgatcacgctgacaaaaatctgtagctcatcagatcgggctttcacgggcagtccttcattaaacggctgacaaatgcccggtcattattaaccagccagcaacaaatggcctcccaacaacgccatgccggtgaaaaatccacgtttgaaccacaaggcactgatgcgccgacgcaccacttggcccagccacatccctagcaaggccggcaacagcgccaacaccgatgcaccgacttcagcaccgcccaacgcaccacgccaagccagcccggcggccagcgccagtgtcgacacggtgaatgacagccccagcgcctgcaccaactgatcacggctcaagcccagggcttgcagatacggtaccgcagggatcacgaagacaccggtggccgaggtgatgatgccggtgaccacaccgcacaaaggccccagccagcgctcggtgcggggtgcgaccctgaaggtcggcaggaataacccgctcaacgcatacaccagtaacgccgcgcccaaggcgcgtaccacccaaggcccgctgcccatgcccagccacaaggtgcccagcccggtgccgagaaaaatcagcaacagcatcggccacaggcgtttgagcaaggcacccaagtggccgccacaggtgagttgccagaggttggtcaccgtcgaaggaatgatcagcaatgccgcagcctgcgcgggcaacatagccaggccaagcatgcccatggccacggtgggcaggcccaggccgatgacgcccttgaccgtaccggccagtaggaaggtagtgatgaccaacgcggtcagggcggggccgaggttttggtagaacgcgaggaaggtattcatggctgcattctggtgcttttcgatagcttgtgaaattcgccatatactgaggcagcctcttgttttgtgtgaggctgataccgctatcgcaggcaagccagctcccacatttgaatgtattcacagttcaaaatgtgggagctggcttgcctgcgatgaggcccgcccagtcaccggaaacctgcagccatgcactttgacctgatcgacctgcgcctctacctgcacatcctggacaccggcaatatcaccgccggcgcggcccgcagccacctgtccctggctgccgccagtgcacgcatccgggcaatggaatcttcactgggtattgcgtttctcgagcgcggccgccgtggcgtcaccccgacacctgcgggcaaagccctggcccggcatgctcgcctgctgttgcaacaggccgaccacctgcaacaggacttggccgaatacgccaatggcgtcaaaggccaggtacgcctgctgtgcaacaccaccgccctcagcgaatacctgccggaactgctcgcgcagtttttgcgcgaacaccccaacctcgatatcgacctgcaagagctgcccagcctgcgcatcacccacgcgttgcgccagggcacggccgacctggggattatttccgatgcagtggacacccacggcttgcagaccctggcgtttcgcgacgacccgctggtgctgatcatgcccctggaccacccgttgaccagcgcgagttttatcgacagcttgcaatgcgactacgtgggcctgggggccaacagcgcgttggcggtatacctggaagaacaggcattgcatgcaggctttcgcttgcggacgcgcattcgcgccgacggttttgatgggttgattcgcatggtcgccggcggcgcgggcctgggcatcgtgcctcaggccgccttggaccgctggccgtcagaacgccgtttcaaggcccacctcctgcaagaggagtgggcctgccgcacgttgctgttatgcgcacgctcgttcgagcacctgccgagttatgccagggctttgttcgaggccttggccctgcccttgcggaagaacccgtaatacacagccgacagaatcagcaggaacggcacgccaaacaccagtgtcatcttgaaggcgtcggtgaaataggtggtgatcatcaccgcccccatcagcaccaaccccagcaacgtgctgtagggaaacaggcgcaactggaacgacaacttcgccccgccatgacgcttgcgatagcggcggaaaaacaggtgcgtgaggaagatcatgaaccaggtgaagatcgcgccaaacatcgaaatcgccatcatcagggtgaacgagctttccgggtacaccacgttgagcaacgtcgccagggcaatgcccgagctggacagcagcaatgcgttgagcgggatgccgttcttgctcagcgcgcccatggacttgggcgcaaaaccagcgcgcgacaggctgaacatcatgcgcgtggtgatgtagagctggctgttcatggccgacagcgccgcgatcaggatcacgaaattcatcactccagtggcgccgggaatgccgatggtctgcatcaccgtgacaaacgggctctgggcctggccggcctggttccagggcacgatcgcgagcatcagtgccagggtcagcaggtagaacaccaccaaccgcacgatggtagcgcgaaaggctttcttcactgcctgctccgggtcggcggcttcaccggcggccacggcgatcatctcgacgctgaggtagctgaagatcgacacgatcaccgcgatccacatgccactcaagccatgggggaaaaagccgtcgtgggccgtgtagttctgcacgccgtagtcagggttgccggagccgaacaccacatacactgccaggatgatgaaaccgacaatggcgctgatcttgatcgtcgagaaccagtattcgaagttgccgaaggtcttcacgctgatcgcattgagcacaatcagcacactggagaacgacacgatccacacccactccggcacgttggcgaaccagtacttcatgtacatcgccaccgccgtcacctcggcgcccaccgccagcacaatcgccgcccaataggcataccgcaccaggaacccagccaatgggctgatgtagaactcggcatacgcgccaaaggagcctgaggtggagtgggccaccgtcatctccgccaggcagcccatcagcagcaaggtgatcaacgcgccgatggcgtagctcaccagcacgctcggcccggcatagccgatggcgtaggcactgcccatgaacagcccggtaccgatggcgccaccgatggcgatcatgctcatctggccggaagtgagctggcgcctcaggcccagttcacggtgggtaatctctgcaaagccgttgtctggcgtggtcactggtgtgcccctttattattgtgatggtggctgacgctgaacctgtgggagctggcttgcctgcgataacggtagtgaatgcaccgacgctatcgcaggcaagccagctcccatatttggtctgtattgctcttaagtgacgctgttgcgcactttgaattgcgcctggtcccacgtgcgcttgtcgagtatttctccgaggatttccacggcgtcccatacctcgatgaagcttgtgtacaaaggcgtgaagccaaaacgcatgatccgcggttcacggtaatcgccgatcacgcctcgggcgatcaaggcctggatcacggcgtaaccttcagggtgttcaaagctgacgtggctgccgcgccgggcgtgctcacgcggggtgatcagctccaggccgtgggcggcacagcggctttcgaccaaggcaatgaacaggtcagtcaaggccagggatttagtccgcaggcgggccatatcggtctgggcaaaaatctccaggccacattccaccatggccagcgaggtaatcggctgcgtaccgcacaggtagcgagcgatgccggcgctgggggcgtaggtggactccatggcgaactgccgggtatgcccgaaccacccggacaacggctggcgcaccacatccaccaacgccgggttgacccacacaaacgcctgggagcccgggccgccgttgaggtatttgtaggtgcagccaatcgcataatccgcattggcctggtgcaggtcgacaggcaccgcgcccgccgaatgcgccaggtcccagatgctcagcgcgccgcactcgtggctcagtgcggtcagcgccgccatgtcgtacatgtagccggtcttgtagttgacgtgggtgagcatcaccaccgccacgtctgcatcaatggcctggggcagttcggccgggctgttcaccaggcgcagggaatagccttgttgcagcagttcggccaagccttcggcgatgtacaaatcggtgggaaagttgctcgcttcactgacgatgaccttacgcgccggcgtacgttggcgctgcacactcaaggcggcgctgagcactttgaacaggttgatggaggtggtatcggtgatcaccacctcgccgtcacgcgcaccgatcaatggcgccaggcgattgcccaggcgctgggacaaatccgcccagcctgcgctgttccaactgcgaatcaagccattgccccactcttcggcgatcacctgttgtgcccgctccagcgccgccaccgggcgcgcgccgagggagttgccatcgaggtagatcaagccctcgggcaaggcgaattgggcacgcaggggggccaaagggtcctgggcgtcaagggcttggcaatggcttcgagtggtcatgggtcgtcctggtttttataagtgaggatggaccaaataatgaacgaacttttagagaattttcgtgcaaagtggtgggtaaagggctatttaagctgtaggaaattcgaatttaacctccaaatacgcggatatcttccaagcatgattctcgacgccaccgacctgcgcctcctgcatttcctgcaacaggatggccgcatcagcaaccaggaattggcggaaaaagtcgcgctgtcgccgtccgcatgcctgcgccgtttgcgcctgctggagagcgagggaatcatcagcggctaccgtgcggtattgaatgccgagcagttggggatcgagctggaagccatcgtgcacctgtcgttgcgccaggatgtggaggactggcatgagacgttcatcaagaaggtgcaaggctggccagaggtggcgagcgcctatgtgatcaccggcgccagcaactatgtgttgcgggtgcaggcgcgcaacctcaagcacttttcggatttcattgtgaaccacctgaaccgcacggcgggagtgatggatatccgttcggagattgtgctgcagaagatcaaggaccgggatgaggtgttggacctggtcctgcgcaaataacacaaacaccccaaaaccaatgtgggagctggcttggctgcgatagcggtggtgaatgttccaccgctatcgcagccaagccagctcccacagttgaccgagttgatcagtcttccagagcacgcactcgttgcatgcgctgctgctctattggcgcatccgccacctgcaactcaaagtcaaaatcaatctgcgcaaagcgcccctgcacgccaaactcccgagccaactgcggatcgtcgctgaagcgaatctcggcaatcagttcatcccgggtggcataggcaaagtcatcatgcaggtacgggtcatccgacaggttgatctgcgtggtcaggtgccggtgcccaggcgccgagatgaagaagtggatatgcgccggccgttgcccgtggcgccccaactggtcgagcaactgttgcgtcggcccggacggcgggcagccgtagcctgaaggcacgatgctgcgaaaacggtagttgccctgggcgtcggtctcgatgcgccggcgcaggttgaactcagactgcgtcgggtcgaaccacgaataagtgccgcccgtattggcctgccacacatcgacaatcgcccctgccaacggcttgccctcggtatcgcgcacttgcccgcgcatgaacaacggcaccgcgtcgtccttgccatcatccagccgtgcctcgtacttggagagcggcgcaccggccacatacaacgggccttcaatggtgcgcggcgtaccacccgacttgccggcctgctcgtcggcggcgtccatcaacaggtccaggtaatgctccaggcccaagccggcggcgagcaggccggcctcttggtttttgcccagttcattgaggtagttgaccgccttccagaactcttccggggtcacttccaggtcttcgatgatgtttacggtgtcgcgcaggatccgataaatcagcgccttggtgcgtgggttgcccgcgtcattgaggttaccgctggcttcttcgagaaactgttgggcgtgggcagtctgggacagacggatggacatggtgcattcctcatcttgtagttataggtgcaagccgtctcagcggtcgtccgcatggatcgacgacggatggcggcacagcgcattcacttcgatggccatgtaggggaacaacggcaattgcatcagcaggtcgtgcaggtcctgcacgctgtcaacatcgaatacgctgtagttggcgtaatgcccggcgatgcgccacaggtggcgccatttaccctcctcttgcaggcgttgcgccaaggctttttcctcggccttgaggctggcagcgcgctcggggtgcatgtcgaggggcaggttcacggtcatttttacgtggaacaacatggcaggggcctcttagtgtttgtcacggcgaaagaacgccaggcgctcttcatcaagcgtcaggcccaggcccggcgcagtggacacatgcagctggaaatcgcggtacaccggtggctcagtgaggatgtcttcggtgagcaacagcgggccgaacaattcagtgccccacgccagtgtgtccagcgtgagaaaggcatgggccgaggccagggtgccaatgccaccttcaagcatggtgccgccgtacaggccgatgccggccgcttcgccaatcgccgccgtgcgcaatacggcacgcgggccgccgttcttggcgatcttgagggcgaacaccgtggccgcgccttcacgcgccaggttgaaggcgtcttcgacacattcgatggactcatcggccatgatcggcgccgggctcgacaggttgagccgggccatgccaccacggttattacgtgagatcggttgttcgatcaggtcgataccgtgctcgcccagcaccttgcacgcccgcagggccacggcttcatcccaggcctggttgacgtcgacgcgtacgctggcgcgctcgcccagggcttttttgatcgcgatcacatgggccaggtcgcggtcgacctcgcccgcgccgatcttcaatttgaagaggcggtgacggcgcaggtcgagcatcttctcggcctcgttgatgtcctgttcggtattaccgctggccagggtccaggccactggcaacgcatcacgcacacgcccgccaagcagctcgctgaccggcagcccgaggcgtttgccgagggcgtcgagcaaggcgctttcgataccggacttggcaaaagtgttgccgcgaatactgcgctccaggcgcaacatggaggcattgacgttactcgcgtcctggccgatcagcagcggtgcgaagtggcggtcgatgttgaccttgatgctgtcggggctctcgttgccgtagctcaggccgccgatggtggtggcttcaccgatgccttcgatgccgtcgctgcaacgcaggcgaatgatgacgagggtctggttttgcatcgtgtgcatcgccagcttgtgcgggcgaatggtgggcagatcgacgatgacagtttcaatcgactcgatggcgcaaatcggcatggcaatacccgttgggttctttatagatttgcgccgattctgtgccgcattttttatggcttccaatatagaattggtctcaagcaataccctcaaggtataaaaggagtcgatatggaactgcgtcacctgcgctacttccaggtgttgggcgagaccctcaacttcacccgcgccgccgaacgcttgcatatcgcccagccgccgttgagccggcagatccagcaactggaggatgaactcggggtgatgctgctggaacgcagccggcccttgcgcctgactaaggccgggcggtttttctatgaacatgccaatgtgctgctcgaacaactgggcaaggtctgcgacaacacccgacgcatcggccaaggcgagaaaacctggctgggcattggctttgcaccgtcgaccttgtacggcgtgctgccggaattgattcgacgcctgcgcactcacaaggccctggagctggagttgggcttgtcggagatgaccaccttgcagcaggtcgaagcgctcaaggctggccgcattgacgtgggcttcgggcgcattcgcatcgacgacccggccatcgtccagcgcgtactggtggaggatcgtctggtggccgtgctgcccagcggtcacccgttgctgggcgccccggccaccctcgcccagttggccggcgaaccctttgtgctctaccccggcaacccgcgccccagttatgccgaccatgtgatcgcactgttcgacgcccatggcttgagcgttaaggtggcgcagtggaccaacgaattgcagaccgctatcggcctggtgggtgcaggcatgggggtgacgctggtgccggcgtcggtgcaggtgctgcatcgggcggatattggctatacgccggtggtggaggcgacggcgagctcgccgatcatcctcagccggcgggtgaatgaccagtcgccggggctgactcattgcctgcaactggttgaagagttgatctgagatcctccaggcaccccatactccatgtgggagctggcttgcctgcgatggcggcggatcagttggcatcgtgttgatcggccggccgctatcgcaggcaagccagctcccacagattgtttttcatccagttcaagtaatgcgcaggcgcttgcgttgcaatgtctggctgggcgactcatcgaacagcttgcggtactccgccgaaaaccgtcccaggtgcgtaaagccccaacccagggcgatttcagagatggtgcggatcgagccctgctccagaatctcctggcgcaccgcccccaaccgatgcttcttcagatacgccatgggcgacagcgcgaagtacttgcgaaacgcatcgaacagtttaaaccgcgacacgcccgccgccgcttccaggtcttccaggtgcagcgcttcacgggcgttgtcgtggataaattgccgcgcgcggatcaggtagtgcggcagtttcacccccagcacgtcgcgcagttcttcagaatagttatttggttgggccaggatcagccccttgatcaatgagctttccaggtcgcgggtaaacgccgcctgctcgtacagttcgctgctgcgctccagttcggcgatgaaataacgcgccatgcgccaccacgaagccggtgctccgtccacagcatccatcaccgactcaaagcgcagcggcgcatcgatgggccgttgcagcaaaccttccagcgactcgctcatcgccgcacgggtgattaccacctgcaacttgcggcagtcaccggaaatcgccagcacctgatgctcattgggcgaaatgatcacgccttggtcgcggttggaactgagacgttcaccgttcttgctcagctcctgctcgcccaccaacggcaggctcaagctgtagctgctgaagtgctcggcgtcttcgatgtcgatggtcacgtcagtgccgtactcgatcacgcccagggtggttgcgcgagatttgaacacgttggcgctgtggtgaaagcgcaggcgctcgggcgttgccgtcgccaggcgatggggcccgcagatgccggacatccagctgcgcgcgccttccaggtcgaagcgttgaatatgaatatcgcgtgtctggctactcatcagggtgcacccacggcggttaggcgtttgcgcgctctgacggcgcgtcgttgaacctcgacagcaagttccaggccacgccagtgcagttctcactgggtggatagcaacggtcgactatgtggataaaccccagagttttgcgaccatcgcccgccatcacagtagcgcatgccgtcaccggcgcgcaccgtcatgggtatttgctgcccaactttgcggcctacgttcccccattaagcggatagcccgccaccgcatcgcagccgcttaatggctcaccgtttagccatgatcaaaaggtgcctcccatgagtggtgcaagaaccgtcgagcaatggaaatcctttatcgaaagctgcctggactttcgcccggcggatgaagtgttccgcatcgcccgcgacatgttcaccgagcccgagttgttcgacctggagatggagctgatcttcgagaagaactggatctacgcctgccacgaaagcgaactggccaataaccacgacttcgtgacgatgcgcgccggccgccagccgatgatcatcacccgtgacggcgaaggccgactcaacgcgttgatcaacgcctgccagcatcgcggtaccaccctcacccgcgtgggcaagggtaaccagtccaccttcacctgcccgttccacgcctggtgctacaagagcgatggccgactggtaaaggtcaaggcgccgggggaatacccggaaggtttcgacaaggccacccgcggcctgaaaaaagcgcgcatcgaaagctacaggggctttgtgtttatcagcctggacgtgaacggcaccaacagcctggaggacttcctgggcgatgccaaagtgttcttcgacatgatggtggcgcaatcggccaccggtgagctggaagtgctgccgggcaagtccgcctacacctacgacggcaactggaagctgcaaaacgaaaacggcctggacggttatcacgtcagcaccgtgcactacaactacgtggccaccgtgcagcatcgccagcaggtcaacaccgaaaacggcgcaggttccagcacgacgttggactacagcaagctcggcgccggcgacgccaataccgacgacggctggttcgccttcaacaacggccacagcgtgttgtttagcgacatgcccaaccccagcgtgcgctccggctacgccaccatcatgccgcgcctggtagaagaacacggccagcagaaggccgagtggatgatgcaccgcctgcgcaacctgaatatctaccccagcctgtttttcctcgaccagatcagctcgcagttgcgcatcatccgcccggtggcctggaacaagaccgagatcatcagccagtgcctgggggttaagggcgagtccgacgccgaccgcgaaaaccggattcgtcagttcgaagacttcttcaacgtttcaggcatgggcacgcccgatgacctggtggagtttcgcgaagcccagcgtggctttcagggccgcctggaacgctggagcgacatctcacggggcagccatcgctgggagaccgggccgacgccaaacagcgaggccatcggcatccaaccggcgatgaccggtaccgaattcacccatgaaggcctgtacgtcaaccagcatcgcaactggcagcagttcctgctaaagggtttggaccagcgagccctggcactgcgggaggtgaagtgatgaatgcgcaattgcagtaccagatcgagcagttcttctatcgcaagtccgagctgtgcgacgcccaggactgggacgcctacgtgcagttgttcgacccacagagtgaattccacctgccgcaatgggactccgaacacgtctacacccaagaccccaagcgcgagatgtcattgatctactacgccaaccgttcgggcctggaagaccgtgtgttccgcctgcgcaccggcaaagccgcctctgccacgccgatgccgcgcactttgcacctgatcaataacgtacgcattgccgagcaggccgatggcacgttggaggtgcgtttgaactggcacacattgttttatcgcctggccacgtccgagcagttttacgggcatgccacgtaccgcctcaagcctgcgggcgacagctggctgatcatgcgcaagcacgccttgttgctcaacgacaccatcaactcggtgctggatttctatcacctgtaacggtggtgcatcgccctgtaggagcgagcttgctcgcgaaaaacgtaagtacgccgcgagcatccaggatgttctgcgtcatcgttgggtttttcgcgagcaagctcgctcctacagggggttcatacctattcacggagttatgtgaatgaatcacaaagtggccttcagcttcgccgatggcaagaccctgttcttcccggtgggcgcccatgagatcctgttggacgcggccctgcgcaacggcatcaagatcccgctcgattgccgcgaaggcgtgtgcggcacctgccaggggcgctgtgagtccggcgagtacacccaggactatgtcgatgaggaagccctctccagcctcgacctgcaacaacgcaagatgctcagttgccagacccgggtgaagtccgacgccactttctatttcgacttcgattcaagcctgtgcaacgcccccgggcctgtgcaggtacgcggtacggtgagcgcggtgcagcaggtatcgaccagcaccgccattttgcaggtgcaactggaccagtctctggattttttgccgggccaatacgcgcgtctgtcggtgccgggcaccgatagttggcgctcctattccttcgccaaccggccgggcagtcaattgcagtttctggtgcgcctgctgtccgatggggtgatgagcaactacctgcgtgaacgctgccaggtgggtgatgaaatgctgatggaggcgcccttgggcgcgttctatctgcggcacgtcacccaaccgttggtactggtggcgggcggcaccgggttgtcggcattgctgggcatgcttgatgagctggccgtcacgggctgcacacaacctgtgcacctgtactacggcgtgcgcggcgctgaggatttatgtgaagcggcgcgtatccacgcctacgcggcgaaaatcccgaactttcgctacaccgaagtgctgagcgacgcctcaaccgagtggacgggcaaacgcggctacctcaccgagcatttcgagctggccgaattgcgggacagatcggcggatatgtacgtgtgcggcccgcctccaatggtcgaatccatccaacaatggctggtggatcaggcacttgatggcgtccagctgtattacgaaaagtttacccagagtaatatctgaccctcagcagttctgaggggccgatgcggcgtgcaatcacccttgagaaaaacaagtagaagggaatgttaatggcggatgacatggttaacccggtgggcctcaagcgaggcctgaaaaaccggcacattcagctgatcgccttgggaggggcgattggtacaggcttgttcctcggctcggccggggtgctcaagtcggcggggccgtcgatgatcctgggttatgcggtagccgggtttatcgcgttcctgatcatgcgccagctcggcgagatgatcgtcgaagagccggtggccgggtccttcagccacttcgcacataaatactggggcggttacgcgggcttcctggcgggctggaactattgggtgctctacgtgctggtgggcatggccgagttgacggccgtgggcaagtacatccagttctggtggccggaaattccaacctgggtcagcgcactggtgttctttgttgcggtgaacctgatcaacaccctgaacgtgaagttcttcggtgaagccgaattctggtttgcgatcatcaaggtggtggcgattgtcggcatgatcgtgctcggctgctacctgctgttcagcggcaccggcggcccgcaagcctcggtcagcaacctgtggagccacggtggattcttccccaatggcggcatggggctgttgatgtcgatggctttcatcatgttctcgttcggtggcctggagctggtcggcatcaccgccgccgaggccagcgaaccgcgcaaggtgatccccaaagcgatcaaccaggtggtataccgcatcctgatcttctacgtcggtgctctgactgtgctgctgtcgctgtacccgtgggatcaactgctgcaaaccctcggcgcgtcaggcgatgcctacagcggcagcccgttcgtgcagatcttctcgctgatcggcaacgacaccgccgcccacatcctcaacttcgtggtgctgaccgcggcgttgtcggtgtacaacagcggcgtgtactgcaacagccgcatgctgttcggcctggccgaacaaggtgatgcgcccaaggcgctgatgaagctcaacaaacaaggcgtgccgctgcgggccctggcgatttcggcgctggtgacgatgctgtgcgtggtggtcaactacgtggcgccgcacagtgcgctggagttgctgttcgcgttggtggttgcctcgttgatgatcaactgggcgctgatcagcctgacccacatcaagttccgcaaggccatgggcgagcaaggcgtgacgccgtcgttcaagaccttctggttcccgttcagcaactacctgtgcctggcgttcatggtgatgatcatcggcgtgatgctggcgattccagggattcgcgagtcggtgtatgcgatgccggtgtgggtggggattatctacatcgcctatcggtttcggatcagaagcgggaaggttgccgtaacccagtaacccctgtgggagcgggcttgcccgcgattgcggcgtgtcagccaacgggtgagccggctgatacaccgccatcgctggcaagccagctcccacagttgactgtatttcacataaaaaaagccccggtaatccggggctttttgtttaaagcgtggagcgtacgcgccagagttcggggaacaacaccgtatcgagcatcttgcgcaggtaccccacgccttccgtaccgccggtgcccggctggaagccgatgatgcgctccaccgtggtgacatgccggaagcgccactggcggaacgaatcttccaggtcgataaacttctcggccaactgatacaaatcccagtaacggctcgggtcgcgatacacctcgcgccacgccgcctccacagagtcatcatgcactgtggctgcggtcgggtcgcgctcggcacgcttgggatcaatcgccagccccgccttgaccatcaggttcaccgcctcgtcatacagcgacggcgtggcgatcgccacctgtaattgctgcagcaattccgggcgatgggcatggggccgcagcagcgccgggcttttgttgccgaggatgaattcgatctcgcggtactggaacgactggaaccccgacgactgccccaggaacgggcgaatcgccttgtactctgacggggtcatggtggccagcaccgcccaggcgtgcaccagttgatcgaagatgcgcgacacccgcgccagcatcttgaacgctggcggcaactcacccaggcgcacatgttcgcgggcggccttgagttcgtggagcatcagcttcatccacagctccgaggtctggtgctggatgatgaagagcatttcgttgtggtccggcgacagcgggtgctgggcactgaggactttgcccaggtccaggtagtcgccatagctcatggactcggaaaaattcagttcggcgttatgccattcttccggggattggttatcggcaggcttatagtctggtgagaaaggacattggctcatcgcgtgggctccttgagcgggcggagaatggcgcgcacagggctcgcgtccaggttggcgaagcgcagcggcagcgcgatcaattcatagtcgccctccggtacgttatcgagcacgatgccttcgaggatcgccataccatgacgagccacggcgttgtgggaatccatggtcttggactgttgtgggtccagggacggcgtatcgataccgatcaggcgcacccccaggctggccagcagctcaatggtctggggcgcgatggcggtgaaattcgaatcccattcggtgagcggcgcttgtggataagtgcgcagcagcacacgctcgggcacgttatccacacgcccttgcaactgatggggctcaaccaacgcgccgctgcccaggcaatgcaacacgcggcaagggcccatgtacacgtccagcgatacctcgccaatcggcgcgccatcggcgctgtaatgcagcggtgcatccacatgggcaccggtgtgcggcgacagggttacgcggcccacatttaccggacactccgggccgaactgccacacgcgctcttcctggaacggcgtatcgcccggccaggtcggggtggccgtgctcaagggcgggctgatatcccaccacgtttttattgggttcattgcaaggctctcacggggtactgaggtgaatgatacgagggccagctctgaattttcttgcgaattctggcgcgacacgggaaatctttcgcagttactgcgaggaaacatcggttttatgcacagatctgtcgctccagatacgccacgacctactgtgggagcctggcttgccagcgatagcggagtgtcgggcaagggagatgctcgctgtaccaccgtcatcgcgggcaagcccggctcccacaggggactgcggtgttcacgtgtctgcgcttctgggcatcccaatgtcgagttcagaccatctgcgcaacgcccaaggccttagggtgcatctttcccttccctgcctcggagtcaacatgtccaagcccatcaccgtactgcgcgacacccacccactgccggtcctggatgcctgcaaatgggaaaagctcgaaggcgacccgcacactgtcaacctcaacgcctacaccagcgaagacggcagcaaaattatgggcacctggatctgcacaccgggcaagtggtacgtggaatacgtgaagtgggaatactgccatttccaggaaggctactgcgtgatcacgcctgaaggcatggagccgatccacctgcgggctggggatatctttgtggtggaaccggggatgaaggggacgtgggaagtggtcgagacggtgcgtaagtattttgtgtttgcctgacccatccccgtccctgtaggagcgagcttgctcgcgaagatcgccaacgaaaacgcgctcatccaggatgaacgcgttgctctcacatttttcgcgagcaagctcgctcctacagcttgcgatagctgttgatgatcgccgagaagtctttaccgccctccccgcgctggctcatcgactgatacaactgctgggccaccgcaccgagaatcaccggctgatgcgcctggcgcgcagcctccgtcgcaaggcccaagtccttgagcatcaggtcggcaccaaaaccaccggtatagccacgcgatgacggcgcggtttcgatcacgcccggccatgggttgtaggtgtcggagctccagcaacgcccggtggagctgttgataatgcccgccagcacttgagtgtcgatacccaaggcatcgcccagggccatggcttcgctgacaccgaccatactgatgccgagcagcaggttgttgcagatcttggcgatttgcccagtgccgacgtcaccgcagtgcacgatgttgcggcccatctgcgccagcaccggttgcagggtggcgaacaattccgggttggcgccgaccataaaggtcagcgtcccggcctgggcaccgccggtaccaccagagaccggtgcatcggccacggccacgccttgtttcgccgctgctgccgcgacatcacggatggtttgcggatcgatggtgctgcaatccaccgctgggatgcctttgccgatgccggcgagtacaccgtcttcattcagccatacgctgcgcacgtgagcggcggccggcagcatggtaatcaccaattcggcgccttgggcggcgtcacgcggtgaaccgctgatagtggcgcccagttcggcgagctccttgagtacggcctggttcaggtcgaacaggttcagcgcgtggccagccttgatcaggttgcgggccatgggcgcgcccatgttgcccaggccgataaatgcaatcttcatgctcgtctcccaggttcagcgcaggttgatggtggtgttgacgccatcgttgaccgtgttgtcgtcgaaccagcggctggtgacggttttggtctgggtgtagaactgcaccacttgcttgccgtacgggccgagatcgccgagcttggaaccgcgcgagccggtgaagctgaagaacggcactggcaccgggatcggaatgttgatgccgacctggcccacatcgatctcgctctggaatttacgcgccgccgcaccgctctgggtgaacagacccgtgccgttaccgaacgggttggcgttgaccagggcgatggcttcatcgagggtatcgacttccagcaccaccagcaccgggccgaagatttcttcggtgtaaatgcgcatgtcggtggtcacgcccgagaaaagggtggggccgacaaagttgccattctcgaagcccggtacttggatgtcgcgaccgtccagctccagcttggcgccttgtttcacgccgctttcaatcagttccaggatacgtgccttggcacgcttggagatcaccgggccgacatccgtgcccgcttcactgccggcattgaccttgagcttttgtgccagcgccttgaggtctggcagccactgcttggccgcgcccaccagcaccaccaccgaggtggccatgcaacgctggccagccgcgccgaaaccggcgccgaccagggcgttgagggtgtgctcacggttggcatccggcagcaccaccgcatggttcttggcgcccatcatcgattgcacacgcttgccgtgtttgccggccaggtcgtagacatgggtgcccacagccgtcgaaccaacgaaggacaccgccttgatgtctttgtgagtgcacagtgcatccaccacgtccttgccgccatgcaccacgttgagcacgccggccggtacgccggcttccagcgccagctccaccagcagcatggtcgacaacgggtcttgctcggaaggcttgaggacgaaggtattaccgcaggcaatcgccatcgggaacatccacagcggaatcatcgccgggaagttgaacggagtgatgccggcacacacaccaataggctggcgcagggtgtaggtgtccacaccgccggccacgttctcggcgaactcgcccatttgcagggtgccgatggaacaggcgtgctccaccacttccaggccacggaaaatatcgccctcggcatcggcaatggtcttgccctgctcggcgctgaggaccacggcgatacgcttggagtgttcacggatcagggcttgcagcttgagcatgatgcgcatccgcgcaccgatcggcgtcagcttccaggtctgaaaggcgcgatgggcggcgtcgatggcagcgttgacttcatcggcagtggcaaacgggactttggccagcacttgttgggtggccgggttgacgatgtcttgccactcggtggtcttggattcgacccactcgccgttgatcagcaacttgacctgttgcacggaaatatcggcagatgcgttcatgtggtctccagaatcttgtagttatgcagagaaccaaggcgttgaatcgccttgaagaatgaggcgttcggactgtttttggagtatagatgtgcaaacttctaataagaacgcacataaaagccggtccaatatgcaaaaaaacatcacctccctgggcgccctgaactgggatgacctgaagtttttcctcgaagtggcgcgcacccgcaaggccagcgtcgccgccaagcgcctggcggtggactacaccaccgtgtcgcggcgcatcagctctctggaagtgtccctcggtacgctgctgttcgaaaaatcccggaccaacggcttcgtgctcaccagcgaaggccagcggttgctgggttacgccgaatccattgaaagcacgctgcacatggcctgcgaacaggtgtccggctccggcgtggcactgtcgggccatgtgcgcatgggttgcaccgaaggcttcggcagcttcttcgtcaccccgcaactgagccatttcgtcgacacttatcctgcgatctcggtggacatcctgcccctgccccacttcatcagcctgtccaagcgtgaagcggacatcgtcatcgccctggaacgcccggaacacgggccgtatgtgtgctgcaaactgtgcgactacacattgcagctctacgccacccaggactacctggaccaacacccgccgatcggcaaacctgcggatttggccgagcatccctttattagctatgtggatgatctggccttcagctcggagttgctgtacctggccaatgtggtgcccggcgccagcgccagcctgcgcagtaccagcgtgatcgcgcagtacgtggcggcccagcaaggccggtcgatggcgatattgccgtgctttttggcggcgcaggatccgcgcttgctgccggtgctgggggagcagattacgattacgcggcagttctggatgtattgccgggaggatttgaggaagttgaagcggattacgttgttgtgggattacattcgagaggtgacggagcagaaccaggggttgttgatggggcaaacgcgggagatgcgttttgccgactgaatgtgggagctggcttgcctgcgatagcggtgtatcagcaaaagctatatctaccgatcaaccgccatcgcaggcaagccagctcccacatattgaatgcatttcagctgggggtaggagaacccgcttagtctgcgatcactacaattgatacccgacgattctcggtgcggcctgctggggtcgtgttcggcgccaccggctcgctgctgcccaggccgcgcagttggatgttttcttctttcatgcccacgcgggtcagcaccttgcccacgcttttagcgcggcgcagggacagggccacgttgtagggttctttgcctgaggcgtcggtatggccgtcaacgcgcacgcgctcgatgccggcgccaaccagggcgctaccgatgcgttcgacgatgtcggtgctgggtttgttgagggtttcgacgtcgctgccaaacagcactttgccggacaggccgaaggcccagccttcatcggtcagctcgaagccttgttgcttgagcacggcgacttgcgccggggtcaggcctttgggtggcgtctggcagccgctgagggccaggaaggccacgagcaaagagataaataaaacgcgtgtgttagcgaacaagggaatcaactcctgtgttgaacgttggcgacggggtgctccgactccgccgtttgctggccgcccgaggacagtcgtttggcctggtacatcgccgcgtcggcggcgttgagcaaggtgccgggtgtggcgccatgctcgggataaatcgcaatgccgatactgagggaggtcaacacctgggtgtctccaggcagtggaatcggcatatccatgctggcaatgattttgtcggcgatgcgctgggcgtcttcggccttgtgcaggggcgccagcaataccgcgaattcatcgccgcccaggcgcgccaccaggtcgtcctcgcgcagttgcgcccgcacgcggtcggcaacggccaccagcacggcgtcgccggcggcatggccaaagcggtcgttgatgtctttgaagcggtcgctgtcgaggaacagcaccgccacccgctcgttgaccttggccgcgctgcgcaaggcgcggatcagccggccttcgaagaacgcgcggttgggcaggccggtgaggctgtcgtggcttgcctggtgggccagggtttcgttttcgctttgcaggtgagtctgccaggcgcccatttcgccgagcagggcattgaagtcactgcccaggctgtcgagctcggcgatctctgccgggggcacacgacggtcaaagtcgcgctcgctgcgagcggcatgggccacggcagcgaggctttgcagcggcccggtgatcccgtccaacagtcgcctcgacaagtgcaaggccacccaggcactcagggcggtgcaaatcaggatccccgccaggccactgagcaagaagcgcagcaggctgccgccatgcccggtcaggtggatgctgccgaccgtttgcccttgatgaagaatcggttgattgatgggctgctcgagcaaggcatgcgccagctgaagctcaacctgcgacaacatgccggtgttcggccgcacccattgcgccaacagcttgccttcatcgtcgaagacttcggcctgggcaacctcttcggtggaggcgatcaggctcagggcttcggtggccgccgaactgtcgttgaacaccacggccgcttccacggtgtagttgatggaacgtgcgatcaaatgcaagttgtgctcggcgtaaacacgtagcgccagcacgccaagcaaagtcagggagacgctggccagggtcaccgccaccagcgccaggatcatgtgcccccggccaatgaccgagcgcagagtcggccgccctttagcgaacctcatggcgcaggcgctcgacggcgcgacagttgcagcacgctagggtgaatgcgcacgccgctgcgggcaacggagtccaggttgacttcgaacgatacttgctcatcgctcacccgcaggcaaaacaggctgcctacggtgcattggtcaccgccttcgctgatgctgagcaccgggtgaccaatcaacgacgtgaacagccggttgcgttcatccatgctcagcttgccgatgtagaccgcgtcgcaggcactgacgatatcgggatggtcggccagcaaacggcgcaccgacaccggacgaccagtggcttgtgttgtgcccttgatcaggtcgtcggtgtactgggtgggcccgacgatgcacaagcgcaacgtctgcggttcaaccggccaacgggcgtagctgaggataccgagcaccacttgggtgaccgcctgggcacgatgctcggccaggctgggcgtctgcgcaaatacgcgcggcgcaagcaggcacagcaccgtcaccagtaacaggcgtctccaactcaaactgcgcgctttgggcgagacagccacgttcatgcagcgatactctcaagggttttcagggtgatgccgcaacgatagcacagcggcggacatccccacgaagcacagcattcgaggggttcgctattttttcagaaaaatcagacgtctgaatgagaaatatcgcctgacctatcagtcatttttttcagacagatggtccaactccaacatcaatccacttaggcgcttgaccttgcgccgtactgcttcctcaaacacaccgccgcgcggctcgatcaggctgaaccagcgcttggcacgggtgataccggtatagatcagctctttggtcagcaccgggttgagggcatccggcaggatcagcgcggtgtgagtgaactccgagccctgggatttgtgcacggtcatggcgtacacggtttccacatcattcaagcggctgggcaatacaaagcgcacaccgccctggccatcgttacgtggaaaggccacccgcagcacgtgggggccgccgtcgctttcgggcaatttcagcgcgatgccgatgtcgccgttcatcaggcccaggccatagtcgttgcgggtcatcagcaccgggcggccttcgtaccactgctcgtcaccttcgatcaggcgtactttgcgcaacgccgcggtgatgcgcaggttgagcccttcaacgccccaggggcctttgcgcacggcgcaaagcagctgaaacgcgtcgaaggcgtgcagcaattgttgcgcccaagcggtccaggctggatcgtcacgcggtgtgtcggcagaggggcgtgccgattgcagcaggttcaggtagtagcggtaaccctgggcgccatcgccttgcccgtccaggaccaggcgctcaagggcgtggtcatgttcgcccttgaggctgacacagaacaggtcgtcgtgacggcctgcggctagtagctggcgggcctcttcggcattttgctggttgacccaacgcgccagttggccgataccgctgccctcaccgaagcggcgcgaatagcgcagcatcaccacttgctgggccaggggatggctgccatcgaggtcttcctggaggccgctggtgctcaggtcttcaccgctgacggcttgcagccaatggcgagtctgcgggctgtaccagccagcttcggcatcgcggcacaaatcgccgagtacggcccccgcttctaccgaggccagttggtccttgtcgcccagcaacaccaggcgtgcgtggggcggcagagcgtcgagcaggttggccatcatttccaggtcgatcatcgaggcttcgtccaccaccagcacatccaagggcaacgggttgcccaagtgatgacggaagtgccgagtgcccggacgactgcccaacaagcggtggaccgtggtgacttgggtcgggattttttcccgcacgttgtcgggcactgtcagtgacagcacttgctggctgatggattcggtcaggcgggcagcggctttaccggtgggcgcggccaggcggatgcgcaacgggctgccggactccacggcgggcgcctgcaacagcgcgagcaggcgcaccacggtggtagtcttgccggtaccggggccgccggtgacgatgctgaaggcgccgcgggtcgccagggcgcaggcgagcttttgccagtcaatcaccccattgggcgccggttggtcgaacaggcgattgaggcgttgcggcagatcggcggtggcgtcttccacgctggccaggcgcaggcgcagggcgtggtcgatacgccgctcgtaggtccagtaacggcgcaggtacaagcgcttgccggacatcaccaacgggcggctgcgggcctcctcgcggccatcgacggccagcgcgaccaacgggcttgaagccagggcatggcaccaatggccgccatccaggccgtgcagcaactgcgagggcagcagcatggcgccggtatgcaggtcgccttcgggcggcaacgacagggcaaaatccggcgctttgagggtttcgaacacatccaggcagacgtggccatgccccagttgatggctggtcaaggccgccgccagcagcaccagcggatcggcgtttgggtccaactcgtacaggaagccgacgaaggctttgtccaaggcccgcagccaaccccgctcgacccaacgtgcaagcaactgcagcaggtcgggggcgcgatcaaggggcaaaagcgcctccagcggtaacggtgacaggctcataacagcactccttgttcccaggcaggctcaaccttgggtgggatgggcttgccctggaacaacaggtccaggctttcgatcaactcacggggcggccgggtgaaatacgcgccctggctcaccgactggctaccgcgcaggaacagatacagggcaccgccgacgtgctggtcataatcgtaatgcggcaggcgcgccttgagttggcggtgcagggccagcaggtaaagtacgtattgcaggtcgtaccgatgctcgagaatcgagtgttccatggcctcaaaggtgtaggccgagtcgtcagggccgagccaattggatttgtagtccgccacgtagtaacggccatcgtgctcgaacgtcaggtcgataaagcctttgaacatgccgttgagcagcaccggttcggcggccacgcgggacacgccgccatgggtgtgctggcacaccagtttgtcgagggcgagcacgtcgacggtgtgactggcgaaccagaattccatctcgatctggtactgctgcaggccgctgagggcgaagcgctcgttgtgcaggggcagcggcgtttgcagcaggtgctccagccagccgctgagggtgacgatccagccttcccagttgcggcggttacagcgtgcgcccacggctttttcgatggcctcgggcgtcacgttgaaaccttcttcaccggcccattccaacaagccgtgaagaaaggtgcctgggttgggaccgcgtgggaaacggtgaatatccccgccggacgcgaccgtttcccgaggggcatcggggtcgaggcgttcgtcatcgaacagcttctgggcctgtgggctttccggcgcttcaaggctggtggcgctcatgctgtcgccaatgcgcaaggcgctgtaggaggcaatccaccagttttctgcggccttacgcacaggcagcaatggcgcgagcagggtcgcttgattgcgcggcggatggaacaagacgtcttgggcgtccggcacaaggtcataacggatggccgcgcagccttgctgcaagtccaacaaccagcgcgccagacctgctgattcgcccaacgacgcgccggctcccagcagatagcccagcgctgagaggtgcaagaccgagctgctgttattaccgcgtttgaggtcagcgatgcccagccagcaggcatgtttggcgcgggtcaaggccacgtagaacaaacgcaggtcttcagccaggcgctcgtcatcggcttgggcgatcagctcggccgtgggtcgtaggctgacgtgggacttgccctgttcatcgtggtaatgcagcggcaagcgactgccgtccacgggcttggccgaacagatgaacggcaagaacaccaagtcgtattccaggcccttggatttgtggatggtcaccactttgaccagttgctcgtcactttccaggcgcaggatctgttcttcaccggcctgccccgacagcgccagatgctcggccaaatgacggatcaacgcctgctcgccatccagttccgaggcggcctgttgcaacaattcactgaggtgcaacaggttggtcagcacccgctcgccatcactgcgggcgatgagggtttgcggtagcttgaagtcgtggagcaggcgacgcagcatcggcaacacgccttgggtacgccagatggcacggtagccacgaaactgcatcacccgcgattcccacgccagctcgtcctggttcagacgctccagctccgccagggacaggttcagggtgacgcaggccagggccgcccttaatggccgttcgacgtccggttccgcgcaagccttgagccaggccaacaggtcatgggcttcctgggcggcaaacaccgagtctttatccgacaggtacacactgcgcacgccacggctggccagttcggcacgtacggcttgggcttccttgccgtcgcgcacaaggatggcgatgtctgacggcaacacgcccttcaagcgccccgctttcacaaagcctgcgctgccttgctggccgccattgagcaacgcaacgatctgcgtggcgcaggcggcggccagttgctgacggtaaaccgcgttggaaatcggctggtcggtgggcaggtgccaaaggttcatagccggcagcgtctggccgtcgacctgcaactgctcgctacggccttgggacagtaccgaatggaacggcactgggttgtcgccatcgggttttcgaaacagaaacgcaccacgggcggtttcagcacgctggaacacatggttcaccgcctcgaccatcgcatggctggagcggaagttggtgcccagggtgtgatggcggccggtggtggcctgccgggcgcgcaggtaggtatagatgtcggcgccgcgaaaggcgtagatcgcctgcttggggtcgccgatcaggaacaggccgctgtcgaggtggttttcctcgatgcggtagatgctgtcgaagatgctgtattgcaccgggtcggtgtcctggaattcatcgatcagggccaccggaaattgctcgcggatcacactggccaggcgctcgccaccgtctgcctggagggcggcgttgaggcggatcagcatgtcgtcaaaccccatctcggcacggtgacgtttctcttcctcgaagcgtttgccaacccagccggcggcatgttgcagcaccgccgcgtcgggcgttggcaaggcgtcgaggctggctttgaggccggccatggcttggatgccggggtgctgcggcggctcgcctttccaggcttcggccatgccatcgggcgtcaggcgggtaaagccggtgccgatatccagttgttccagagtttcgtcagcggcccaggcgctgatcttttcgaaccagggttcgaagtaacgcgcttgcatctttcgcccatcgaccgctttggcggcgacggcttgcaggcagatatcccgcagctcggcggcccattgttgccagggtgccttgagggcaaccagcgcggcacggcgttcttgcaggcaggcgctgatcagttcggctggctcgcgggtttcgtcggtgggccgctcgctgccgaacaatgcacgcacccgtggcatcagcgccgcggggccaccccaattattgcgcacccagttgagcgcatcgtcgtgcattgggtagcagaacaagcgccagtagtcgcgcagcacttcgcccagcaggtcgctatggtcggtttccagggtttgtgtgaacaggctgccgctgtcgaacgcgtgttcgcgcagcatgcgctggcaccaactgtggatcgtcgaaaccgccgcttcatccatccattgcgcggcgatgtccaggcgattggcacaggccggccattgctgcggatcatagtgctcgcgcaggtctgcgatcagcgcatcgggctgttcgatttcgtcacggaagaagcgtgcggcttcggccaggcggatgcgaatgcgttctcgcagctccttggtggcggcgtcggtgaacgtcaccacgaggatttgcggtggcagcagttcgcggccgaaaccggactcatcaccgccgtggccgagcaccaggcgcaggtacaaggcggagatggtgaaggtcttgccggtgccggcactggcttcaatcaactggctgcctttgagcgggaacgccagggccaagggtttgccgatcatgcgttggcctccgtgctggaaagcgatcgccagggggcgttgatcagcgggcgatacagggtttcgcaccagccttcgaactcttcgctggcgaccagggccgcgtagtcgggaaattgccgcgtgagggctggcgtttcgcggcgttcgccgtcagtggtgatgccatcgccttcataggctttgctcgcagccgcttgggccttggcggggtcagtctggccgagccaggcgaacgcggttttcaccgcgacaggtagcggtgtactcattcccgtgcgccaggccaaaagcaggttgccgaggatttcctcggcgctggccttgtccagcggggccaacagtaaggtgtcgtcactggctaccagaccggtgctcaagggcagaccacaggcgcaggccaccacgtgattgacccaggggcggatgaggcgatgccacttgcgtgtcttgatcgagccaatgctgttggggatggtggtgacgcttaacagcccgccatcactgcgtcggtgcaggccgctgatccaaccttccagctggatgccctggtacgcaaagctgatcggttcagccccggtatgcggggtgggccacagcgccagaaggtcttgatagcgttgcaccaggtctggcagcggctcgatcagttcgttacgcaggcattcaccgaaaccgaccatcggcagcaggccgctgccttgcaggcgcagggcctgggcgttgagcgcctgatcgagctgatcgggttgggtgagcgccgcgttcagcaggctatcgctgaggctgtagcgttgcaacgcgtccagcacgaagggttcttcgtcagccagcggcacttcggcggcttcgaagaatactttcaggcgctggctgaagaagtgcttgaccgggttgcgcaggaaatcctgtaactggccgaggctcaggggttcttcctgttggtgaggggtcaagccttgctcttgggtgatgaccgctggtgcctgatgcagcaattgccattcgcgggcatagctgaacagtgaatcgccttcgtggaagtagcgggcgctgaagggttgcagcgggtgctcctgggtcattgcgtcgagcagcggctgatcgttgttggcgtgctgccagccgctggccaagtggtcgcgcagttggccgatcagtaccgaggccgggcgatcgctgttgtcacggatgctgcggcctacccagctgatatacagctggtcacgggcagacagcagcgcttcgagcagtaagtagcggtcgtcttcgcggcgagaacggtcgccggggcggtaatcgctgcccatcaggtcaaaatccaggggtggctgggcccgcgggtaatcgccgtcgttcatgcccagcaggcaaaccaacttgaacgggatcgcacgcatgggcatcagcgtacagaaattgaccgcccccgccaggaagcgctgggacaggcgcccctgatccaatccggccagccatgcctcacgtactaccgtaaggggtagctcgtcttgcaagccgacggactcgcaggtttccagccaggtttctcttaattgttcgagctgtcccagcagatagtcatcgtgctcgctgctgggcaggaaaaacagctgcatcaagcgttgtagacgctcgccccaggcctgtggggaggcgggttctgataacgcctgatgggcatcgttcaaggcatcgagcaaggcgaccagcgggccgatcaaggccgcatcgaggccaccgatttcgtcatacggctcgataccgccgcaggccgagccagtgccgacggcatagcccagcagcatacggcgcaggccgaatcgccaactgttttgctccagctccgtgggcaggcctaaaccggcgcgttgctcggcgttcaggccccagcggatgccggcgccttcgatccagcgatgcaaggtgggcaggtcacgctctttgatggcgaagcgttcgcgcagggccgggacgtcgagcaggtcgaggatttcgctgacggggaagcggctgtcggggagtttgagcaagtgctcgacggcgatcaacagcgggtcgcgaccacgttggccttggtctgtaagggtgaaggggataaagcgtgggtcatggcgttcgagctggccgaagaccgcgcgaatatgcggcgcgtagctgtcgacgtcgggcaccatgacgatgatgtcccgagggcgcagtgtggggtcggcgctgaagcgatgaagtaattggtcgtggaggatttccacttcgcgttgggcgctgtgggcgatatggaaacggatcgacgtatcgcgttgcaagtcgacagcgggccagagctcacgggtttcattcaacgggcgcagttcgaggatatcgtcctggagttggttgaggagcgtggtgggttcgctgtcgctgaacaggtcaatacggccgtcgcgaaatgcggcgcggtagctgttggggtcgtcgtagctgtccagcagactgatgtaatcacggccctgcttgccccaggcagcgagcagcggatgggcgtgctggtgcaaagtttgtgggtcgatagtgacgggcatgcccgttttgcgcgcctggcgtttgtattcgttacgcagcaagtccttgtcggcgacgatgtccgaccaatgatggcggcaggggttatgcacgcagagcaggacttggctgaaacgagccaagcccgccaaggcttccagcgcctgggccggcagcgatgagatgccgaagacaatcacccggggaggcaagccgggaggtgcttgttcaaggctgttgatgcgctcgatgaagcgctgatgaacgccggcccggctttcggccatgcctgattcacctacatccaacagcagcgcgcgccatagctcggcttgccagcagttggctgggttgagcggtttggaatcgcctcgaccattgcgcagttggtgccggcctgcggcccagtcttccagccagtcagcacggtagacctggtattggtcgaacaagtcagccaggcgctcggcgagttggtagcgtttgcgcaggtcggtgtcttgcgtcaggaagcgttgcagcggctcgaagtgcggttggtcgatcaactcgggtaacaggcgcatgaggcgccaggtcagcggggctttatcaagcagggacttgggcgggatctcatcacggcccaagaccatgcgataaagctgccacataaagctgccaggcagttgcacgtcgatagctgcggcaatgccacagccgcccatatcatcggcttgcgggtcttcggccaaggccagcttgagccactgggcaatgccgttgctttgtaccagggcgatttcgttttccaaaggcgccagcgggtaacggcgcatccaactgaccaccaggcttcgcagctcgtccaggcggttgccatgaaccaccatgaatccagggctgagggacgtcgcgtccggcataacggcttccttgggaaaagcaaaatcgagggatggactttagcactgtggtgcacggggcggacacaggacgaacaagtgtacggggacaaggtggacacttttcgagcgcccaaaacaaaaccccaactgctttcgcaattggggtttcggaatttaatcttgacgatgacctactctcacatggggaaaccccacactaccatnnnnnnnnnnnnnnnnnnnnnnnnnnnnnnnnnnnnnnnnttgtttaccaaggagttttccgtttcgactgcgccggaagtggggcgaattataggcttccagaatctgccgtcaaggcttaattacgcttttgttgcagaaggcgcttttttagcaataaggcgagggattcgtcgcgtcaccggcggcacccgcagcaacagaagcagcgcacctatagaagcgtagatagcccactccttcagatccgcccgcactatccataacatgtgcagcaaaccgagcccaagaatcacatagaccaggcgatgcagcttcttccagcggctccccaaccggcgctggctgtagcggttcgacgtgacggccagcatcaggagagcaacaaaccccagcgcacccacaatgatgtagggccgcttgctcaactctacgccgagctgcgaccaatccagccccaggacaaatacgcaataggccgccaggtgcagcacgacataagcaaagcaccacaggcccaactgtcgacgcaccgctatccaccccgcccaaccgctcaacttctgcagcggcgtcatggcaagtgtgatcagcaacagaatcaacgttcccaaacccaatcgatcgacgagcaccttgccagggtcaggccccagcgcggaactccacgcctcatacaaccagagcaatggccacactgcggcggctacaaacacgccggtgcgccagatgggatagcgcatcagtagttcttccgcagatcgaggcctgtatataaagaagcgacctcatccgaatagccattgaacatctgcgtctcgcgcacattcggactaaacaggccgctcggcagacggcgctcccgcgcctgggtccagcgaggatgatccaccgtagggttcacattcgcataaaacccatactcatcagccgcaatactttgccaggtggttttcggctgctcactgaccaggctgatccgcacgatggacttcacactcttgaagccatacttccacggcaccaccaaacgcaaaggcgcaccattctggttgggcaactcccgcccatacatacccacagccaggatcgccagcggattcatcgcctcatccaggcgcagcccttccacataaggccagtcgatcaagccgaaacttgagcgttgcccaggcatgctcttgggatcctgaagggtttcaaaacggatgtacttggctttggaggttggctcgacctgcttgagcaacgccgagatgggaaagcctatccacggaatcaccatggaccatgcctcgacacaacgcaggcggtagatgcgctcttccaattcatagggcttcatgaagtcctccagagcatagcgcccaggctttgcgacttcaccatctaccaccacgctccagggctgcgtcttgagcgagcccgcattcgtcgccgggtcgcccttgcctgtcccgaactcatagaagttgttgtagtgggtggcgtccttgaacggtgtgatggcctcatccttgaccgtcaccgcctgccacttcgtattcggaagtttttcggtaaaccagccgggcgcgctgcccggctcgacgtcggcataccgcgcagcatcgcccgcactggcccaacgcggcaagctgctggcggcaataccggcaagcgcaccgccgagcaggctgcggcgagagaggtagaaagattcaggcgtgacatccgattcgtgacaatcggacgctttgggtaatttgattaacatggtaactccgcagcgttggagaactgatgcaccaatagactgcggagtatgggggaaattacattaaggcaatgttttgtcccgacgcagacgcaacaagtactgaatagggcccgaagcggcgtaggccaggaacgccagcagcaggatacgcggtggatcactgaacacgaccgcgaacaccagcaccacgacaaggatggccacgaaaggcacgcgccccttgaggtcgaactccttgaagctgttgtacttgatattgctgaccatcagcatgccggccgccgccaccatcagggcaaccagaaacgacatcttcgacccttgaatcccgtagtcactgaacgcccagacaatccccgcgacaacacccgccgctgccgggctggcaaggccgatgaagtagcgtttgtcggcagtccccacctgggtgttgaagcgcgccaggcgcaaagcggcgcccgcgacatagatgaaggcaaccatccagccgaccttgcccatgtcacccaatgcccaggcaaacgccagcagtgcgggagcgacaccaaaggcaaccatgtccgacagcgagtcgtactcggcgccgaaggcactttgggtattggtcatacgcgccacacgcccgtccaggccgtcgagcaccatggccacgaagattgcgatcgcggcaaaaccgaagtatttgctggcactcgccgcatcacccgccgccagcgcactctgggcactcatggagttgatgatggaatagaagccggcaaacaggttcgccgtggtgaacaggttgggcagcagatagatgccacgatgccggaccttgcggccttcggcgtcatgcccttcttcgacatgttcatcgatcggcagcatgctttcggcgtcggaagcctgatgtggctcttcgggacgttcgctcatggactttaccttgcaacggtgtgaaaaaaattcgacagatacttgcagcgactgttcgcctgcaaacgatgcagctttataccagaaccggccctccaaacgaaaaaacgcggcctaagccgcgttttcccttgatgcgtacgacttagttcttggctttgtcgacgatcttgttggcaccgatccacggcatcatggagcgcagttgctcgccgatgacttcgataccgtgagcggcgttgttacgacgcttggcggtcatcgaagggtagccggtagcgccttcgctgatgaacattttggcgtattcgccgtcctgaatacgtttcagggcgttgcgcatggcctggcgagactcggcgttgattacttcagggccggtcacgtactcgccgtattcggcgttgttggagatcgagtagttcatgttggcgatgccgccttcgtacatgaggtcaacgatcagcttcagttcgtgcaggcattcgaagtaggccatttccggcgcgtagccagcttcaaccagggtttcgaaaccagcttttaccagctcaacggtaccaccgcacagaacggcttgttcgccgaacaggtcggtttcggtctcgtccttgaaagtggtttcgatgatgccggtacgaccgccacccacaccagcagcgtaggacagcgcaacgttcttggcgttgcccgacgcatcctggtagatcgcgatcaggtcagggataccgccgcctttgacgaactcggagcgcacggtatggcccggtgctttcggcgcgatcatgatcacgtcgaggtcggcgcgtggcacaacctgattgtagtgaatcgcgaagccgtgggagaaggccagggtggcgcccttcttgatgttcggctcgatttcgttcttgtacagcgaggactggaactcgtccggggtcaggatcatgaccaagtcggcagccgcaacagcagaagcaacgtcagtcactttcaggccatgagcttcagccttggcaacagtggccgagcctttacgcaggccaacagtcacgtcaacgccggaatctttcaggttgcacgcttgggcgtggccctgggaaccgtagccgatgatggcgactttcttgccctggatgatcgacaggtcacaatctttatcgtaataaactttcatgaggttcctctatatatccaggccgtaaggccattcgctaattgggttagatgctgagtactttgtcaccacgggcaatcccggtgacaccactgcgtacggtttccagaatcgaggccgtcccgatcgactggatgaagctgtccagtttgtcgctggtaccggtcagttgaacggtataaacgctggcgctcacatcgacgatctgcccgcgataaatatcggtagtgcgtttgatctcggcacgttgggcacccgtggccttgaccttgaccagcatcagttcgcgctcgatgtgagcgctttccgacaagtcgaccagcttgaccacttcgatcagcttgttgaggttcttggtgatctgctcgatcacctcatcgtgacccacggtggtcaacgtcaggcgcgacagggtcgggtcttcggttggggccacggtcaggctttcgatgttgtagttgcgttgcgaaaacaggccgacaacacgagacagagcgccgggttcgttctccagaagcagggagataatatgccgcatgattaagtacgctccgtcttgttcagccacatgtcgcgcatagagccgtctttgatctgcatcgggtagacgtgctcgctggtatccacctgaatatcgatgaacaccaggcggtccttcatggcgaacgcctcttccattttcggcttcagatctttcagatcgttgatgcgaatgccgacgtggccataggcttcaaccaatttgacgaagtctggcaacgattccatgtaggaatgggagtgacggctaccgtagctcatgtcctgccactgacgaaccatgcccagtacgccgttgttcaagcagacgatcttcaccggaaggccgtactgcaggcacgtcgacagttcctggatgttcatctggatgctgccttcgcccgtcacacaggcaacgtcggcatccgggaagctcagcttcacacccatggccgcagggaaaccaaagcccatcgtgcccaggccaccagagttgatccagcggttaggcttgtcgaacttgtagtactgcgccgcgaacatctggtgctggcctacgtcggaggtcacaaaggcgtcgcccttggtcacttcgcacagggtttcgatcacggtttgcggcttgatgatgctgccgtcgcccttgtcgtaagggaacaggccgcgatcaccgcgccattcgtcgatctgcttccaccagctggcaacggattccttgttcggcgtttcgccgatgtccttgagcgcagcgaccatttcggtcagtacgctttctacaggacccacgatcggcacatcggccttgatggtcttggagatggacgccgggtcgatgtcgatatggatgatcttggcattcgggcagaatttgctcgcgccgttgatcacccggtcatcgaaccgcgcgcccacggccaggatcacatcggcgtggtgcatggtgaggttggcggtgtagctgccgtgcataccgagcatgccgacgaactgacggtccgaacccgggaatgcgccgaggcccatcagggtgttggtcaccggcaggttgagcagcttggccagttcggtcaacggagcggaaccgccacccagaatcacgccaccaccggagtacagcacagggcgcttggccgccaggagcatttctgccgccttgcggatttgccccgagtgcccacgcacggccgggctgtaggaacgcagcttggcttttttcgggaaaacgtattcgaacttctcggccgggttggtcatgtctttcgggatatcgaccactaccgggcccgggcgaccggactgggcaaggtagaacgcctttttcatgacatccgggatttccgagggatgcttgatcatgaagctgtgtttcacgatcggccgggaaataccgatcatgtcggtttcctggaatgcatcggtgccgaccatagtgctaggcacctgaccagagatgatcaccatcggaatggagtccatataggcagtcgcgatgccggtaatggcattggttgcgcctgggccggacgttaccagtaccacgccggctttaccggtggcacgggcgtaaccgtcagccatatgggtcgcggcctgttcgtggcgaaccaggatgtgggtaacagccggttccttgaacagtgcgtcgtagacatgcagcagagcaccacctgggtacccgtagatatagtcgacgccttcgtcacgcaaaaagcggacgagcatctcaccgccagataaaagctccacgttgttcacctctaaaacgccagaataccgtccgttaaaaaccgacgggtcttaataggtttacttctcaacagagcatgagcgacggtggtcgccgactacgtcagcactgactgagcaagtattgggatcgtcccaagtgttgcgggcttttcccacccagcgcgaggtaacgcgttgcgggtgttacaggtcggcgcggatgtgcgcctcatgatctgctgagcgggcctgcttctggcagtcccgatacagcggactttggattcttctgtttcacgcccttcaagtcaagcaataattgcgcttttttccaactaagcgcatgagaacgtagaagaaagggctttgaggagggataaaactcgcctgaatgtcgtcaagcggtagaaatgtgcgcaagactgccggaaaaaccggcagtcaggcaattaacgagcgtcgacgatcaattgatcgaactttttcagcgcgttacgcaagccgaggctctcccgcggtcggtcggcgtagaccatctcggccatttccaggatccccgacgcattcggcaagggcaggtcctgctccaggatctgcttcatacgcgagaggaagatccattgcagccactggtggaagtccagggtatcgacggaaaagggctcgacactgctgagggcttcagcgccaggggaaacttcatcccaccagccctgtacgcgcagttcgcgctcgatcagcaataactgctcggcgatcgcggggaaacgcgcatccatcagagactgaccttggctttttgccgcgcctgggctgcaccggcggcatccccttgggcggcacgtgcatcaccgatcaacgcccacaggctggcttgcaggtctggacggccattggccaggctcaggccgcgacgagcgaactgctccgcttggggcgcatcgccctgggccatgcgcacctgggccaggcgatagagcacttgtggctcacgcggcgccacgcgctgggcacgttcaaggctcgacgaggcgccgttcaagtcgccaccggcctgctgctgctgagcggtggtgagcaacgccagcaccgggccatccagttgttcgtcagccgacaacccgcccgcattggacgatgacggaataccgctcggcgtcgaaggcatgttgtaggtgccctggttgaccggcgcggtttgaatcggcgtggagttcaccggcccggaagtgctcgggcctggggtccatggctcggcactgataggcgccgaggttgcagccccactgccgggcaccatcactacgacgccggaatcctggggaattgcctgggttgcagcttgggcaggccgtttgaccacggtctgacggaagccgccattggccgaaatgcggtcgctattggagacggacgtgcttgagtccaccacagggatagagccgcgctgcacgctggagcaaccgccgagcaaagccagagccgtaattgctggaatccacaacttgttcacttgaaaccctctttgcttaattcatccagcccttgacccaatccatcaccgattccgcgtcagcaggtgtactgccactgcacgcggcgccgggtggtggttcgctgccgcgaatatacggcatctgcaccgcgcccggacagttggcgtcggagccttggccggtgtgcggatcaatccaggcctgcacgatattgtccggctgcggcatgttgagcggcaacggatcagccttgcgcatgaaactggtccatacctgcaacgcgccggtcgcaccggtgaacggcgtcttgccgttatcgtcgcgccccagccacaccacggccagtacatcctggccgaaccctgcgaaccagctgtcgcgggagtcgttactggtaccggtcttgccggccagggtcaggttcgacggcagcacgctgtagaccgaacgccctgtaccctcccgcatcacgcgctgcatggcgttctggatcaggtaaatggaacccgcgtcgaagcgctgctgaatctggaacgggtagcgcttgagcggttcgccatcggcggtcagcacactgcgaataccgcgcatcggcgtgttgaagccaccattggccagggtctggtacatggtggtcacttccatcggcgtcatggacgcagcgcccaaaagcatggatgggaatgcagggaactcacgctccacccccagtcgcgctatggttttcaggacatttggcacgcctacctcaagccccaggcgcgaggtcgaaatattgtaggaatgcgccagcccttgatacaggaacaccgtgccatgggagcggcggtcgaagttcttgggggtccatacctggccatccgcacctttgaccgacagcgggtcatcggacagccaactggtcagcgtgtacttgctgggtttttccagtgctgtgaggtagaccgcgggcttgaccagcgagccaattggccgcacggcatccagtgcgcggttgaaaccggcgaaactggcctgccggctgccgatcatggcctggacttcgccggtttccgggttggtcacgaccatggcggcttcgacttcatccgagcctttacggccggtcaggcgcttgaaggtgtcgttgaccgacgcttcggccttcatctgcaggatggggtcgaagctggtgaagatccgcaggccctcttcggtcaagtcttcgtcgcggtagtcttcgcgcagttggcgcttgaccaagtcgataaagccagggaatgagctatccgccagcttgccgcgagtggtcacacccagtggcatttttttcgcagcggctacttgttcagcggtagcgacaccctgctgctccagcacatcgagcaccaggttgcgacgttcaagcgcacgctccgggttgcggcgcgggttgtaataggacggccccttcaccatccccaccagcaacgcgacctgatgcaacttcaactcggacaacggctgcccgaagaagaactggctggccaggccgaaaccgtgcacggcgcgctggccatcctgcccgacgaatacctcgttgaggtaggcctcgaggatttcctgcttgctgtaatgcagctccagcaacatcgccatcatggcttcggtgagtttacgggtgaggctgcgttcgttggtcaggtaaaagttcttgaccaattgttgcgtcaacgtactgccgccctgggtcatcttgccgccggaggtgttgacccagatagcacgggcgatcgacttcggcgagacaccccagtggctatagaaatcgcggtcttcgacagcgaccagggtttccagcaggtacggcggcacctgatcgagcttgatcaggatgcgatcttcaaggtttttcgggtaaataccgccgatcagcaacggttcaagacgcaccaccggcagcttggagccattgagcgacgacagctcagccacatagtcgccagagaaacgcacgcgcaccggctgggctttttccaggccttcgtagaactggaagccacgggtgttcaggtcgacggtattaccgctgaccgccgcagcgccggggccattgctcacaggttcgcggcggtagcccagtgcatcgagctcggtgaggaaatcttccttgctgagcttctggccagagaacagttccagcgggcgtgcatacaccttggccggaatcgtccagcgcttgccggagaatttttcctgcaccacggcatcgaggtacaccgcaaggccagcgaccgccacaaggcccaccaggccaagcttgatcacccagcccagccaagggcgcggggcgcgggaaggaggttttttacgggaacggggagatcgggttcgagtcatggcggcggattatacgcactttattgatgatcaacatgagccggacagcggtttgcacgactggcatcagcagccataatgccccccatgattttccccagactttgaaggatcgcccgtgagccagaccctgatcgctgccctgcaaaacccggccttgtaccctcatccggttgacgcgtttcaagtcatcgagacccatatttcctgggtgatactgacgggcccctatgcatataagctgaagaaaccgatgaacttcggcttcctggacttcaccaatctggacgaccgcgggcatttctgccgcgaggaactgcgcctcaaccagcgcctgaccgaagatttgtatcttgaagtgttgccgattaccggcactgccgaggcaccgcaactgggtggcgacggcccggccatcgaatacgcgctgaaaatgcgtcagttcccgcaaagccagatgctcagcaccctgcaagccaacggcgaactgaccagcgcgcacatcgatgagatggccaaacagattgcccagttccacctccatgcccctcaagtcccacaagaccacccggccggcacgccgcaggaagtaatggcgccggtacgccagaactttgaccagatccgcccgttcctcagcgacaaggccgacctgacgcaactggaggctctgcaagcctgggctgaaagcagcttcgaacgcctcaagcctctgcttgcgcagcgcaagctcgacggctatacccgtgaatgccacggcgatatccacctgggcaacgccaccctgatcgatggccgcgtggtgatcttcgactgcatcgagttcaacgagcctttccgctttaccgacgtgtacgccgacaccgcctttttggccatggacctggaagatcgcggcctcaaatgcctggcacggcgctttatcagccagtacctggaactgaccggtgactaccagggcctggaactgctgaacttctataaagcctaccgtgcgctggtgcgcgccaaggttgcactgttcagcatgccgagcgaagccaacccggtgcaacgcgctaccaccctgcgccagtaccgcaactacgccaacctggcggagagctacagcaccattccttcgcgtttcctggcaatcacccacggtgtttcagccgtgggcaagagccacgtggccatgcgcctggtcgaagccctgggcgccatccgcctgcgctcggatgtagagcgcaagcgcctgtttggcgagcagcaggtggagaacaccatgcaggccggcatctacaatcaggacgccagcgctgccacctacgcacgcctgaacgagattgccgacaccgtgctgcgcgccggctacccggtagtgctggatgccacgttcttgaaacgcgcacagcgtgacgccgccgcccaggttgccgaagccactggcgcgccgttcctgatcctcgactgcaacgccccgcacgccgttatcaccagttggctggcccaacgccaggcggataaaaacgatccgtccgacgccacactggccgttatcgaagaacaacaagccagtcgtgatccgctgactgccgaggagctgctgctcagcaagcgtgtcgagaccaatgaaagcgggacgctcgacgccttggtcgggcatatccgccagcgtctgccgggcctgtaagaaatatttcttggtcgtgtcgccgtcttcggcgcgcgacctcgcgatagtggcactatactggctccataacaccagccagagtcgcgatcatgagtcagcccaagcttcttgataccccgctctacgccctcctgcataaggacgatatccgcggcttcaaccaggagcgccctgagaacggcaccatcgacatgcgcggtggcgactttcgcgggttggacctgcgcgacctgaacgccacgggtgttgattttaccgacgcctattttcgctctgccgacctgcgcggcctggacttgcgtggctgctcactggaaggcgccagcctggcccatgcacagatttcgggtgcttatttcccgcccgaactcacggctgacgaaatacttatgtcagtcaatttcggtactcgcctgcgctaccgcaccaagtaaccccacacactgagtgacggccacatcccctgcctggcgggcgcgttgcgcctatctgcgagcaagcgccgtcgcgccattcttataagcttttcagcccttcctgaccaaagaaccacgcttttcctactgagcgctacactcattttcaggctgcctggtcacgacacccaccgcaccattcggccaacgcaaggaggcttgatgaacgatgagctgcaacacctgaaaaaccttggcaagacgtcagcgcagtggctgcatgcggtgggcatccacagcgcgtccgacttgcgtcggctgggggcggtcgatgcctaccgagccgtgcgcacgcgcgggtttcgagcctcgaaggttctgctgtatgcgattgaaggggcattgatggatgtgcactggaacgacatacccacggagcgcaaggaggccttgaaccgtcagctggaagcgatttcagtgcatcagaagaactagagtggcactcaaacccagtgtttacgggcattacaaacgagcgtttgagaaaactacatgagccagaaaaacaaatgttgactctcaaatgagaatcgttatgattatcacaactggtcgcgagatcagccgataactgaaagaccattggttcggactctcagattatctcctcatcaggctaatcacggttatttgacccggctcttgccgggtctttttttgcccgtggattaacccgcctcagcgcgcaatgatcagcggatgcccacgctccggatgcagctgtaccagcacatccaggccgaatacagccttgagcggctcaggttgcaagactttggagggcgtatccaacgcgtgagggcggccgttttccagcaacaggatccggtcgcagtaacgcgctgccaggttcaagtcatgcagaatgaccagcaccgcagcgcctctgtcggcgaaatgtcggatagcttgtaaggtggtgtgttggtgcagggggtcgagcatcgacgtgggttcatccagcaacaatgtctgccccgcttcacctggccataactgcgccaatacccgcgccaggtgcacacgttgccgctcgccgccggacaacgccaggtaactgcggccactcaggtggccgacatccgccgcttgcagggccgcgctgatgatttcgtcgtcgcgcactcgcccggtctgatggggcaagcggcccatgcccaccacctcttcgacacgaaaagcaaaatccagggtggaagattgtggcagtaccgccaggcgctgggcacgctgcgcgccggtcatgtgcttgagcgcctggtgatccagccagaccttgccctgatccggctgcaactccccgcacagcgccccaagcaaggtacttttgccggcgccattggggcccagaacgcccagcacttcgcccggcaaaaggtccaaggtgatatcggccagcacggttttcccaccacgccggatctgcaacgcttctacccgcaacatcaggcgcgccctcgtaacaataaatagaggaaaaacggcgcaccgataaacgcggtgacaataccgatcggcagctccgccggcgccaacgccaggcgcgccaccaggtccgcaaacaacagcaggctcgcccccgccaatactgaggccggtaacaacacccgatgatccggccccgccagcaaccgcaccagatggggtaccaccaacccgacaaaaccaatcatgcccgccgccgccactgcagcgccaacgcctaaagccgtacagaacaccagctcacgcttgagcctttcaacatcaatacccagatgattggcctcagactcacccaacagcagcgcattcagcgccttggcccggcgcggcaaccacagcgccacgcccgcgctcaccagcagcaagggccacaaccgcgagtaacttgcgccattgaggctgcccaggttccagaacgtcagggtgcgtaacgtggcgtcgtcggccagataggtaaagagccccaccgcagaaccggccagggccgtcagggcgataccggcgagcaacatcgtcgcgacattggtctggccattgcgacgtcccagacgatagaccagcgccgtaacgcccaggccgccgagaaatgcgcacagcgacaatagatacggcccgaatgcctccggcagcccgccaaagaacgagccaccaacaatcgccaccgctgcccccaacgctgcgccgctggatacgccaaccaaccctggatcggccagcggattgcgaaacaacccctgcatcgccacacccgacaacgccagcacaccgccgaccgccagccccaacagggtgcgcggcaagcgaatctgccccaggatcaactcggcctgctccaatccttgcggctcaataggtacgcccatcagtcttaacgcagccctgagcgtgtccactaacggcaggctgaccggccccagtgccaatgagagccagatcgccaatacacacagcagcgacagcccgataaacagcgtttttggcttaaccagagtggtcatggagcaggcttggcctgggacggataaaagccggcagacagtttctccaggctttgcggcaatcgcggccccaggccacctaccagcaaggtcggatccagctcaaagactcggtcgctcttggctgccggcgtagaagcaaggatcggattttccttgaacaaggcggcacgcgccgcgtccccggtcagggcgcgatcggcaaacaccagcacctcaggattcaaaccggccagcgattccacggaaaacggtttatagcccacatgcgtggccagattacgcccaccagcctgctgcaacatccagtcagcggccgtgtccttaccggcgatcagcggtttgccaccggcatggccgagcagcaacagcacacctggagccttctgtgtagcctgggccttggccacccagtttttttgctgcgccagcgcctgctcatacccggcaaacaaggcatcagcctgggcctcactaccgagcagtttccccaggtgttcaaggttgcctttgagcgtgggcaaatccggctgggccgagaatatatccacctgcaccccggcactgcgaatctgcgccagcactggcggtggccccatttcctccgtgcccacgaggatttgcgggcgcaggctgagaatgccttcggccgacaactgccgctggtaaccaatgctcggcaaggccttgagcgacgccggatgctgactggtggtgtccacccccaccagcttcgactcaccgcccagggccgtcacccattccgacagcgcaccgccggcactgacccagcgttgcggcagttcagaggcgtgcaccccagggttgaccagcagtgaggcaacaagcgcaatagcgctggtactcaggcgcataacagggtttccttcctagggcagggccactcaagcactcattgatgtgacagattacccctgccatgcatcgtattgagcacccaatcagctgacgggcgaagcaggcatttgataattgtttgcatttgcacgtcaaggcacttaaggattgaaatgaagtttctctgcgcctccggcgaccttgcccccaacagcagccgcggttttgatatcgatggccacaggctgttggcggtgcgccgggacggcattgcgtacttctatctcaaccgctgcccccatcgcggcatcccgctggaatggcagccagatcgcttcctcgatgaaagcgccagcctgatccaatgcgccacccatggcgcgttgttcctgattgaaagcggcgagtgcatcgccgggccttgcgcaggccaaagcctcaccgccctgcccggccgcgaagacgaacagggattgtgggtcgatctctagtcgcccagcagcaccttcagccgacgctcgacgtaaatctcctgcggcgtaacccgtacgccataggccaacacctctacacctgcagccttggcctcacgtagcgctgccgcataaccggcgtcgatttccaccgccgggcgcaccgcgtcgatccccgacaggttcacgcaatacagctgcacggcccgtataccgtcgcgcgccagatgcgccagctcacgcaagtgcttggcaccgcgctgggtcaccgcatcggggaaagccgccaccgagctgccatcaaagcccagggtgacgcttttgacctcaacaaacgcagcaccctgggggtaatccaggcgaaagtcgatgcggcttttctcctggccataaggcacctcacgcttcaacgcagtaaagccattgagctcagtgatcacaccggccagcaaggcttcttccaccaactgattggcacgcgcggtgttgacgcacgccagccggccctggggcgtttcggcaatctcccaggtgcccggcagcttacgcttggggtccgtggaacggctgaaccagacctggccaccttcgaccatgcagttgagcatcgagccggtgttagggcagtgaatggtgagcaactcgccggtaagggtttcgatatcggtgagaaagcgcttgtagcggcggatcagccgcccttcttcaagaggaggattaaaacgcatcagccttgccagctccgcaaaccacgggcgatccgctccaccgcttcttgcagccgatcgagattttgcgtgtaggcaaaacgcacgtgatggcccgcctggtagcgaccgaaatccaacccgggcgtaaaggccacatgctcggtttcgaggaaatgccggcaaaacgcgaaggcatcgccgccgaacgcgctgatatcggcatacagataaaaggcaccttcgggctccacggcgataccaaaccccagctcacgcagggccggcagcaggaagtcacggcggcgaccaaattcggcacggcgctgctccagaatctccagggtttgcggggtgaaacaggccaacgcggcatgctgggccatgcttggcgcactgatgtagaggttttgcgccaatttctccagctcacccaccgcttcaggcggcgccaccagccaaccgaggcgccagccggtcatgccgaaatacttcgaaaaactattcaggacaaaggcgtcatcatcgacttccagcacactggcggcgtccgtgccgtaggtgaggccgtgataaatctcgtcgaccaccaaatgaccgttgcgcgccttgatggcgcccgacagcccagccaactcgtcccgggtgaggatcgtgccggtggggttggcgggcgacgccaccagtgcgccgacactgtcctggtcccaatgcctggccaccagatcggcggtcaactggtagcgtacgtctgggccgaccggtaccaactgcgccgcgccttccacaaggcgcaggaagtgtcggttgcaggggtagcctgggtccgccagtagccaatgcttacccggatccaccagcaaactgctggccagcaataacgcgccggagccaccgggagtgatcagaatgcgctgcgggtcgatgctcaaaccgtagcgttgctggtagaaaccactgatggcttcgcgcaactccggcaagccacgggcggcggtgtagcgcgtcttaccgtttgccaacgcagcttggccggcctggatgatcggttcggcggtggtgaagtccggctcgccgatttccaggtggatcacgtcgtgaccggcggcctgcagctcattggcacgcgccagtaacgccatgacatgaaaaggttcgatggcgcgactgcgcgcactgtagggctgagccattagccttccttagacggtgaggacaaaatctggattctaccgaaccctcgcggtaaaacatgctctattgcctgattggggctgcaagtgcaccctgcgcgcgctcgtaaaacagctaaaatcaacattcgaggcaatacatacccagtcatggcgggctgctgcggtttgcatcccctttgccctggacctcgacaaccgggagtagcgcaccctgaatctatctggtaagttcgcccgcttgcagccgcagggccggcaggtgtcggtgacgttgcaatcctgcgcaatggattagaagagtgagaggcggtctattcatgtccacccaagcaaagcaacagcagactcaaggcctcggcggcttcgaaccctatgtcgaaaaaaagggcgaggagtacatgggcgagcccatgcgcgagcacttcaccaagatcctcaacaagtggaaacaggacttgatgcaggaagtcgaccgtacggttgaccatatgaaggatgaagcggccaacttccctgacccggccgatcgcgccagccaggaagaagagttcgccctcgaactgcgcgcccgcgatcgcgagcgcaagttgatcaagaagatcgacaagaccctgcaactgatcaaagacgaagaatacggctggtgcgaatcctgcggcgtcgaaatcggtattcgccgactggaagcccgcccaaccgcggacctgtgcgtagactgcaagaccttggctgaaatcaaggaaaaacaggtcggcaagtaacgttgccgagttgaacaaatggagcgtgcgaacgctccatttttgtttctggcgtttaccggttatgcagtagtatccgggccatgacagcctctacttatatcgggcgcttcgcccccacacccagcggccatttgcacttcggctccctggttgccgccctcgcctcctacctcgatgcacgcgcccaccatggccgttggttgatgcgcatggaagaccttgaccctccccgtgaagagcccggcgctcaggcggcgatcctgcatgcgctggaaagctacggctttgaatgggatggcgaactggttcgtcagagcgagcggcatgatgcctacgccaaagtactgaacgatatgttcaaccacggcctggcctacgcctgcacctgctcgcgcaagcagttggcgccctacaacggggtttacccaggcttgtgccgcaatgccggccacgcccagcaagacgccgccatccgcctgcgcgtgcccgagttggagtatcactttatcgaccgcgtccagggcgagttccggcagcatctgggccgcgatgccggcgacttcatcatccgtcgccgcgacagcctctacgcctaccaactggcggtggtgctcgacgacgcctggcaagggataaccgatatcgtgcgcggcgccgacctgctcgactccacaccgcgccagctgtacctgcaagagctgcttggcctgcgccagccacgttacttgcatgtaccgctgatcgtgcagccagacggcaacaagctgggcaagtcctaccgctctgcaccgttgacagccgaccaggccacgcctttgctactcagagcactgcgcgcccttggccaacaggctgacacgcaattgcttcacgcaagcccacgagaactgctggattggggcattgcacactgggacgccacccgcatcccgcgcacgctgaccctggccgaagcgcaattgagttgaaggcgcttgcaggttgccagccatccgttaacatcgcggcagatttttaatcagaggccaacatgtacatctatcgtttggtcctgctgctggtcgtcgggatctacctgttctcccccgccatcatggattggtggatcgacgccacgggcgcctggtatcgcccttatctgctgtggctgatcctgatcgtcgtgaccttcatcctgcagagccaaaaagatgccgatgagctttagtctcacccagatgctgctgatcagcgccgcctacctggctgcgttattcggcgtggcctggatcagtgagcgcggaatgattccgcgggcgatcattcgccatccgttgacctacaccttgtccctgggcgtgtacgccagtgcctgggcgttctacggcacggtggggctggcctatcagtacggctacggctttctctccagttatcttggggtatcgggcgcgttcctgctggcaccggtgctgctgtacccgatcctgaaaatcacccggacgtaccagctgtcttccctggcagacctgtttgcctttcgctttcgcagcacctgggccggcgcgctgaccaccatcttcatgttgatcggtgtgctgccgttattggccctgcagatccaggcggtggccgactccatcagcatcctgacccgcgagcccgtgcaacatcgggttgccctggcgttctgcgcgctgatcaccttgttcaccatcttctttggttctcgccatatcgccacccgcgagaaacaccagggcctggtgtttgcgattgcctttgagtcggtcatcaagctgatcgccatcggcggcgtcggcctttatgcgctctacggcgtgttcgacgggccgcaacagctggagctgtggctgctgcaaaaccagaccgccctcgccgccttgcatacgccattgcaggaaggcccatggcgtacgctgctgctggtgttcttcgcctcggcgatcgtgatgccgcacatgtaccacatgaccttcaccgagaacctcaacccgcgctcgctggtcagcgccagctggggcttgcccctgttcctgttgctgatgagcctggcggtgccgctgatcctgtgggccggcctgaaactgggggccaccaccaaccctgagtatttcaccctgggcatcggtattgccgccaacagcccggccctggcgctactggcgtatgtcggcgggttgtcggccgccagcgggttgatcatcgtcaccaccctggcactctcgggcatggcgctcaaccacttggtactgccgctgtaccagccgccggctgagggcaatatctaccgttggttgaaatggacccgacgcgcgctgatcgtcgcgatcatcatggccggctacgcgttttatctgctgctgggcgccgggcaagacctggccaacctcggcatcgtcgcgtttgtcgccaccttgcagttcctgccgggcgtgttgtcggtgctgtactggccgaccgccaatcgccgtggctttattgcagggctgctggccgggatcctggtgtggaccgtcaccatgctgctaccgctggtcggcaacttgcagggcttctatatcccgttgctgaacatgatttacgtgctggacgacaccagttggcacatggctgccatcgcctcgctggccgccaacgtactgatgtttaccctgatctcgctgttcaccaacgccagcgccgaggaaaccagcgccgccgaagcctgcgcggtggacaacgtgcgccgcccgcaacgccgcgaactgcatgcggcctcgccccaggagttcgccacgcaactggccaagcccctgggcgccaaggccgcacaaaaggaagtcgaacaggcgctgcgtgacctctatctgccgtttgacgagcgccgcccctatgccctgcgccgcctgcgtgaccgtatcgaggccaacctgtccgggttgatggggccgagcgtgtcccaggacatggtggaaaccttcctgccctacaaggccggtggcgaaaactacgttaccgaagacatccacttcatcgaaagccggctggaggattaccactcgcgcctaacaggcctggccgccgaactcgacgccctgcgccgttaccaccgccagaccctccaggaactgccgatgggcgtgtgttccctggccaaggaccaggaaatcctgatgtggaacaaggccatggaggaactcaccggcatcgccgcccagcgagtggtgggttcgcgcctcaataccctgggcgatccatggaaagagctgctgcaaggcttcatcaacctgccggacgagcacctgcacaagcaacacttggccctcgacggccagacccgctggctcaacttgcacaaagccgccatcgatgaacccttggcaccgggtaacagcggcctggtgctgctggtggaagacctgaccgatacacaaatgctcgaagacaagctggtgcactccgaacgcctggccagtattgggcgcctggcagccggcgtggcccatgaaatcggcaacccgatcaccggtatcgcctgcctggcgcaaaacctgcgcgaagagcgcgaagaagacggtgaaatcaccgaaatcagcgggcagatcctcgaacagaccaagcgggtttcacgcatcgtccagtcgctgatgagctttgcccactccggcgcccatcagaatcaggacgaagcggtgtgcctggccgaagtggcgcaggatgccattgggctgttggccttgaaccggcgcaatttcgaagtacagttctttaacctgtgcgatccggaccattgggtcgatggcgactcacaacgcctggcccaggtgctgatcaacctgctgtccaacgcccgcgacgcgtcgccggccggcagtgctgtacgtgtcaagagcgaggctttcgagcatacggtcgacctgatcgtggaagacgaaggcagcggcattccacagaacatcatggaccgattgttcgaacccttcttcaccaccaaggaccccggtgaaggtaccggtctgggccttgcactggtctattccatcgttgaagagcattatggacaaatcaccatcgacagcccggctgacacacaaagccaacgcggcacccgtatccgggtgaccttgccgcgtcatgtcgaagcgacgtccgctgtgaactgagaccgtcgagagaattgaatcaatgccgcacattttgatcgtcgaagacgaaaccattatccgctctgccttgcgacgcctgcttgaacgtaatcagtaccaggtcagcgaagccggctcggtgcaggaagcccaagagcgattcagcattcccacgttcgacctgattgtcagtgacctgcgcctgcccggcgccccgggcaccgagctgatcaagctgggccagggcaccccggtgctgatcatgaccagctacgccagcctgcgctcggcggtggactcgatgaagatgggcgcggtggactacatcgccaagcctttcgatcacgacgaaatgctccaggccgtggcccgcatcctgcgtgaccgtgtgtcggccagcagcgcgcctgccgagcagcgccccaccggcaaggccagcgccggcgaaaaaccgggtgtcgacaacagcaacggcgagatcggcatcatcggctcctgcccaccgatgcaggacttgtacagcaagatccgcaaagtggcgccgaccgactccaatgtattgatccagggcgaatcgggcaccggtaaagaactggtggcccgtgccctgcacaacctgtccaagcgtgccaaggcgccgatgatctcggtgaactgcgcggcgatccccgaatccctgatcgagtccgagttattcggccacgagaaaggggcgttcaccggcgccagcgccgggcgtgcgggcctggtggaagccgcggacggtggtaccttgttcctcgatgaaattggcgagctgcccctggaagcccaggcgcggttgctgcgcgtgctgcaggaaggcgaaattcgccgggtcggttcggtacaatcgcagaaggtcgatgttcgattgatcgcagcgacacaccgagacctcaagagcctggccaagatcggccagttccgtgaggacttgtattaccgcctgcatgtcatcgcgctcaaactgccagccctgcgcgagcgcggcgccgacgtcaacgagatcgccaacgcgttcctgctgcgtcaaggcgcgcgcattgatcgcaccgacctgaaatttgccgcagacgccgagcaggcgatccgtcactactcgtggccagggaacgtgcgtgagctcgagaacgccgtcgagcgcgcggtgattctgtcggagagtccggagatttccgccgagttgctgggcatcgacattgagctcagtgacctggacgacgacgatttcatcggcttggccccgcagcagggcggagccagcaataccagccatgaaccgacggaagatttgtcactggaagattacttccagcacttcgtgctcgagcatcaggaccatatgaccgagaccgagctcgcacgcaagctgggcgtgagtcgcaaatgcctgtgggaacgccgtcagcgcctgggcattccacggcgcaagaccggggtggccagcgaaagctgagggcgcagccccacaggtaacacctgttgatgtgaaaaaactgttaccgctgacttttcacgtaacaaaagccggggcttacggtaacgaagccccggcttttttttggccctcaaaccggcgaaaccagcccaaccccccggttttgctgggcggcacaaaagttggcacgcaccctgctatatgcttagtacaaaaacaataacaagctttgtacaagacaataaaaataagacgaatcgactcacgcataacaaaaacaacacggcggaggcgcagctaactgattcttttggagaggcgttgcatttggggcttgccccgcaaccaggccgagaacaacaaaaactgccctaaggcagagcctgaactggttggatcgtagatcagcaacacagcgaccaaagcaatccgtttgctcttgactcccgattgggagtgtcatgaaggtgaagctttatggcgagggcgatcaacaaaaacaagaagcccgacatcaataataaaaatagagcacgcaactacttctgggggagcttcggctccccttgtagtttccgggatttgaccttcaaacgcttatggcgcaatgcctttagcttgttcctacaccatcccccgactaaatgctagaatccccgcccatcatgcggtcattcttcgttatggccgaacattccttcaaacagtgcatcccatgctgaagaagttgttccagtcattccgttctcccttgcgtcgaacgcaacacaaacgcagcacgcctgaagtgctcaatagcagccagcattcgctgcagcgcgctcaattcagccgttatgcagtgaacatcgtcgaacgtttgcagaacgccggctaccaggcctacctggtgggtggctgcgtacgcgacatgttgctcaacatcacgcccaaggatttcgacgttgccaccagcgccacgcctgaacaagtgcgcgccgagtttcgtaatgcacgaatcatcggccggcgcttcaagctggtgcatatccactttggtcgcgaaatcatcgaggtcgcgaccttccgcgccggtcacccgcaaaacgatgaagaggaagacaccaaccagtcttcccgcaacgagagcgggcgcatcctgcgcgataacgtctatggcactttggaagaggacgcgcaacgccgcgacttcaccatcaacgccttgtattacgacccggtcagcgagcgcatcctcgattacgccaacggcgtacacgacattcgcaacaatctgatccgcctgatcggcgacccgacgcagcgctatcaggaagacccggtgcgcatgctgcgcgccgtgcgattcgcggcaaagctcaacttcggcatcgaaaagcacaccgccgcgccaattcgcgaactggcgccgatgctgcgggaaatcccctcggcgcgcctgtttgaggaagtgctcaagctgttcctttcgggctacgccgccgacacctttgaaatgctcgtcgatctgcagttgttcgacccgctgttcccggccagcgccgaggccctggagtacaacccgacgtacacccacaccttgatcagcgaggccttgatcaacaccgacctgcgcatcaagcagaacaagccggtgaccccggcgttcctgtttgctgccttgttgtggccggccctgcccaaacgcgtactgcgcttgcaggaccgtggcatgccgccgatcccggccatgcaggaagcggctcacgagctgatcgccgaacagtgccaacgcatcgccatccccaaacgtttcaccatgccgatccgcgaaatctgggacatgcaggagcgcctgccacgccgcagcggcaagcgcgccgatctgttgctggacaacccgcgcttccgtgccggctacgacttcctgctgctacgtgaaagcgccggcgagcagaccgatggcctgggcgaatggtggaccgattatcaggacgccaatgacagccagcgccgcgagatgattcgtgaactgggcagcaaaggcgatagcgccggcgaaggcccgaaaaagcgtcgccgcagcggcaccaagcgtaaacgcagcagtgccgatgcctcgggcgctgcgggcgaataaacatggaacgtatctacatcggcatgggcagcaacctggctgccccgcaccaacaattgcgcagcgcgatccaggcgctggcgcaactgcctggctcccacctcgctggggtgtccgctttctaccaaagcgattcattgctgccgggccagccgcgctacaccaacgccgttgcggcgctggacagccacctggcgccattggacctgctcgatgcgctgcaaaccatcgagaacgatcaggggcgcgaacgcctggaacgctggggcccacgcaccttggacctggatatcctgctgttcggtgatcgcctgatcgacgagccgcgcctgaaagtgccgcactaccagatgcatgtgcgcgcgtttgtgctgtatccgttggctgagctggcgccagccgacctgcatctgcctgacggccagcgtttaagcgacctgctcagcgcctgcccgttcgtcggcctggaacgcctcccgcaagaatgactcggtcaatgtgggagctggcttgcctgcgatgcaagcgactcggtgtatcagccacaccgagttgatgccatcgcaggcaagccagctcccacattggatattcagtgcggcccaaacccgtgctcaacttgctgaatcgcgtcagtaacagcggtaacaccgccatcgtaacaatgcggtaacacatccaattgacttcccgtgtcctcctcacgactataggcgtcccgctgccgccaacccggcgcgacagggcgcaatccaggccttataagcactgctttcaagacagtgcgcctgtataaacgaagactcacgcgcgttactcgctgtttccaagcgcctgaacgaggacccttttcatgccagacattaccctgaccaccttgcagagcctcaagctcaaaggtgaaaaaatcaccatgctgacctgctatgacgccactttcgcccacgccagctgccaggctggcgtcgaagtgctgctggtgggcgactccctgggcatggttcttcaagggaatgacagcacgctgcccgtgaccaccgatgaactggcctaccacaccgccagcgtcaagcgtggcaacgatggcgcctttatcatcgcggacctgccgttcatgggttacgccactcttgagcaaaccttcctgaacgccggcaagctgatgcaggccggcgcgcacatgatcaaagtcgaaggtgcggtgtggctggccgagtcgatccggctgctggccgagcgcggtgtgccggtatgtgcgcacatgggcctgacgccgcagtcggtgaatatcctcggtggctacaaggtccagggccgcaatgaagcccaggcccgccagatgcgcgccgatgccatcgccctggaacaagccggtgctgcgatgattctgctggagtgcgtgccgagcgaactggctgccgaaatcacccaggctgtcaaagtgcccgtgatcggaattggtgccggtgcagccaccgatggccaggtgctggtattgcacgacatgctcggcctgtcgatcaccggccacgtgccgaagttcgtgaagaacttcatggccggccaggacagcatccacgccgccctgagcgcctacgtcagcgaagtgaaaaacgtgacgttcccaagcgttgaacacggattctcggcatgaacaccgttaaaaccgtccgcgaactgcgggctgccgtaacccacgcccgcagcgccggcaagcgcatcggctttgtgcccaccatgggcaacctgcacagcggccacgccaccctggtgaccaaggccgcacagcaagcggattttgtggtggcgagcattttcgtcaacccgctgcaattcggcgctggcgaagatctggacaaatacccacgcacattggccgccgaccaggaaaagctcctgcaggccggttgcaacctgctgttcgcgcccacggtcgaggaaatgtaccccgatggcatgaacggtcagacccgtgtcagcgtgccacagctgtccgaaggcttgtgcggcgccagccgcccagggcacttcgaaggtgtagccacggtggtcagcaagctgttcaacatggtccagccggacatggccgtatttggccagaaggactaccagcagttggcggtgatccgcgccatggtccgcgacctgaacatgccgatccagatcatcggcgagcccaccgtgcgcgccgaggacggccttgcgctgtcatcacgcaacggctacctcaccgaggagcaacgggcggttgcgccagtgctgtaccgcgcgctcagccagatcgccacggccatcaaaggcggtgatcatgatttcgccagactgcgcgccgagcacatccagcagattgaagccgcagggctgcgcatggactacctggaagtgcgccaaggcgtgcatctgcgcccggccacggctgaagatcgtgatgtggtgatcctggtcgccgcttacctgggggcgacgcgcctcatcgataacctgcacctgaacctcgcctgaccccgctttaccctcaacctgttgccccgacggctgtgccggtataaaaaagtaccggccacagcgcagacaaagccaagacatatccacacgctaggtttaatgtaactgccctgcgctatggttagcgctgtctggaacccaatccttgttataagactggatgttccgggctttgaagtgtcctaaaggcagtccccgtaataaaaaggaaacccgcagcgatggcgtactaccgcacccctcatgacgttaccgcgctgcccgcctggcaagcgcttgttcaacatcgccaagccatgcaggatttcagcatgcgcgaggcgttcaatgccgatcctcagcgtttttcccagttcaccttgagcagctgcggacttttcctcgattactcgaaaaacctgatcaccagcgaaacccgcgacctgctggtgggcctggccaaggaagtcaatctcaaggcggcaatcgacgcgcagtacgctggcgaaccggtcaactcctccgaaggccgccctgccctgcacaccgccctgcgccgcccggtgggcgacaagctgtcggtcaacggcgtgaacatcatgccggacgtgcacaaagtgctgaaccagatcactgacctggtcggccgtatccacgacggcctgtggcgtggctacaccgagaagccgatcaccgacgtggtaaacattggcatcggtggctcgttcctcggcccggagctggtctccgaggccttgctgtcctatgcccacaaaggcgtgcgttgccactacctggcgaacatcgacggcagtgagttccacgaactgaccatgaagttgcgcgccgagaccacgctgtttatcgtctcgtccaaatccttcaacaccctggaaaccctgaaaaacgcccaggccgcccgcgcctggtacctggcccaggggggctcggaagccgagctgtatcgccacttcatcgccgtctcgagcaacaatgccgcggccgtggcctttggtatccgtgaagagaacattttcccgatgtgggactgggtcggtgggcgctactcgctgtggtctgccatcggcttgccaattgccctggctatcggcatgtccaacttcaaggaactgctgtcgggtgcctacaccatggaccagcacttcctgaacgcgccgttcgaagccaacatgcccgtgctgctgggcttgctgggcgtgtggtacggcaacttctggggtgcgcagagccatgcgatcctgccgtacgaccattacctgcgtaacatcaccaaacatttgcagcagctggacatggaatccaacggcaagagcgtgcgccaggacggcacgcccgtgtccaccgataccggcccggtgatctggggcggcgtgggctgcaacggccagcacgcttaccaccagttgctgcaccaagggactcaattgatcccggccgacttcatcgtgccgatcgtcagtttcaacccggtgtccgaccaccatcagtggctgtacgccaactgcctgtcccaaagccaggcactgatgctcggcaagacccgcagcgaggccgaagccgagttgcgtgagaagggcctgccggaagccgaagtacagaagctggcaccgcacaaggtgatcccaggcaaccgtccgagcaataccctggtggtcgagcgcatcagcccgcgccgcctgggtgcgctggtggcgatgtatgagcacaaggtgttcgtgcagagcgtggtgtggggcatcaatgccttcgaccaatggggcgttgaactgggcaaggagctgggcaaaggcgtgtacaaccgcctgaccggcgccgaagaaaccttggccgaagatgcttcgacccagggcctgatcaactacttccgcggtcgtcaccgcggctgaggccgttcattcaaggccaccgtccgtttggacgttggccttgaaccctcttgcctcagggtgcatctttatgacttgtcgcaaaaacaagaataaggagcgctcatgttcgatatcagcacctttcccaccgccgatgccgtccgccgggctgcacaactgcgtcaagaggactaccagcgcctctatcgccaatctatcgaccagccagacaccttctgggccgaacaggccaagggctttctcgactggataaaaccctggcacagcgtccagcagtcagacatccacaccggtgccgcccaatggtttgccggtggtcagttgaatgtcagctacaactgcatcgaccgccacctggcgcagcgcgccgatcagccggccttcatctgggaaggcgatgatccgtcaaaatcctgcacgattacttaccgtcaactgcaccaaaacgtcagccgcctggccaacgtcttgaaaagccgtggcgtgaacaaaggtgatcgcgtgtgtatctacatgccgatgatccccgaagcggcctacgccatgctggcctgcacgcgaataggggcggtgcactcggtggtgttcgggggtttctctcctgacgccctgcgcgaccgcattctcgacgccgattgccgcaccgtgatcaccgccgacgaaggcgtacgcggtggcaaacccgtggcgctgaaacagaacgtcgacaaagccctggccagttgcccgaacgtcagcaccgtgctggtcgtcgagcgcaccggagcgagcgtgacttggcacgaaggccgcgacctcaagtaccaagccgccctggacgccgccagcgacaactgcccacccgagccgatggacgccgaagacccactgttcatcctctatacctccggcagcaccggcaaacccaaaggcgtgctgcacaccacggctggctatctgctgcaagcggcgatgaccttcaagtacgtgctcgattaccaagaaggcgaagtgttctggtgcaccgccgacgtgggctgggtcaccggccacagctatatcgtctatggcccgctggccaatggcgccacctcgctgatgttcgaaggcgtgccgagttatccggacagttcgcgtttctggcaggtcatcgataaacaccaggtgaatatcttctacaccgcgcccaccgccctgcgtgccctgatgcgtgaaggcaacggcccgttgcagagcacatcccgcgccagcctgcgcctgctgggcagcgtgggtgagccgatcaacccggaagcctgggactggtatttcaacgccgtcggcgaacagcgctgcccgattgtcgatacctggtggcagaccgaaaccggcggcatcatgctcagcccgctggtcagcgcccagcgcatcaaaccgggctgtgctacccagcccatgttcggcgtacaaccggtgttgctcgatgaacagggcaaggaaatcagtggcgccggcagtggcgtcctggcgatcaaggccagctggccggggcagattcgcagcgtctacggcgacccgcaacgcatgatcgacacctacttcaagccctaccccggctactacttcaccggggatggcgcacggcgcgatgaagacggcgactactggatcaccgggcgcatcgacgatgtgatcaacgtctcgggccatcgcatcggcaccgccgaggtggaaagtgccctggtgctgcatgaccaggtcgccgaagccgctgtggtgggctatccccacgacgtcaaaggccagggcatttacgcgtttgtcacccccatgaatggcgtcgaacccagcgacgaattgaaaaagcacctgctggagttggtcagcaaggagattggcagcttcgccaaaccggaactgatccaatgggcgcctgccctgccgaaaacccgctctggcaagatcatgcggcgcatcttgcgcaagatcgcctgcaacgaactgggcagcctgggcgacacctcaaccctggccgaccccagcgtggtggacggtttgatcgacaaacgcctcaaccggtagcgccaggataatccccggcctgtgcaggccggggttagctgttaaacttcgcgccccctttttcttattcatctgcaagcaaggcgcgctccatgactcccttgaatcaggcgctgcgcgccgccctcgatcaccgccaagacctgatcaacacgctgcacagccagggtacggactgctatcggctgttccacggcagccaggaaggcgccggcggcttgaccatcgaccgctacggtccgcaattgctggtacaaagcttccaccagtccctggaaacggcagacctgctggacctgcaccaactgatcaaccagtacatgggcctggaattgttgctggtgtacaacgaccgtgcccgcggcaactcacgcatcgaccgcgaagacacggtgtaccgcgcagagcctggcgcattggaagatctggtcggccacgagtggggcctcaattaccgtgtgcgtgggcgccacgccgggcaagacccattgctgttcctcgacctgcgtaacacccggggctgggtcaaggacaacagcgccggcaaaagcgtgctaaacctgttcgcctatacctgcggcgtcggtttgagcgcggcagcaggcggcgcacgcgaggtgtgcaacctggattttgccgagggcaacctggcggtggggcgtgaaaacggccaactcaacccgcagttgccgagcatggagtttgtgcagtccgattacttcccggcgattcgccaattggcgggcctgccgatcacccagcgtcgcgggcagaagctgccgagctatccgcgcctggaacagcgccagtacgacttggtactgctcgatcctcccgcttgggccaagagcgctttcggcaccgtcgatttgttgcgcgactatcaaagcttgctcaaacccgcactgctggccaccgccgacaatggcgtgctgatttgctgcaacaacctggcaaaagtcagcatggaggactggcgtgagcaggtgctgcgctgcgcggaaaaagccgggcgcccgatacgcgagtggcaagtgatgacacctggggccgactttccttccagggaccaacagcctccgttgaagaccctgatcctgcatttgtaggaagtttcccagcgcccacggttcttcggaaccgaattcccgtgccatactccaaggcactctcgttcgacatagatggcgttcacccatgcccaaaggattgatccgcgccgtaggcgccttgttgaccgcccttgctttgtacagcttgctgggctttctgatattacccggcatcgcccttcgcattgccaaccaacagttggccaactacgccacagtgccggcgcgaatcgagcgcatcgagctcaaccccttcagcctggaactgacgttgtggggactgaagattggtgagccgggcaaagagcaagtgggtttcgaacgcctctacgccaacctgcagatcgacagcctctggacccgcgccctgcacctggccgatgtgcaactggacaagcccaagaccgaactgctgttcgacaagtccggccaactgaacctggcgcagctgttcaaattgccaccgagcgagccaaccccggccgatcctgatgccaagccgttcccactgcgtatcgacagcatcaagctggcgggcggtaacctgcacttccaggacctgcgccccagcgagcctatcgaattcctctacgacgcgctcgacttcgagctgaaaaacctcagcaccttgcctgacgacaatgccgacatgaccctggtcgctgcgggccccgaagggggtcagatcgactggaaaggcaatttcagcctggtaccgatcacctccgaaggcaccttgaaggttaccgacggcaagatgaaagcgtggtggccgtatgtacgtgacgcactgccactggtgctggaagacggggtgctcaacttcagcactgactacaaattcagcctggccaaagaaaccgagctgaacctgaccaacaccgccgccagcatcgccccctttgctatcaaggcccccgatggccggccactggcacgcctggagcgcctggacgtcagcgaaaccacggtagacctggccaagcagcaggtcattgtcggcaagatccgcagcaacaagctggaaacctgggccgcccgggaggccgatggtcaactggattggcagaaactgttcgccagccaaccgagcaaaccggccaaggcaccggagccagccgctgccgacgcgccttcggcggccccgagcaagccgtggcaagtgctgctcaaggatgtgcaactgcgtaactatcaggtgcacctggcagaccgccaggtaaaacctgcggtcgcgctggaactgggcccgttgaatgtcgacgtacagaacttcgacagcctcaaccagagcccctttgccttgaagatcgacaccggcctgggcaaacaaggcaagatccaggcaaccggcgaggttaacctcaaccccgtcagcgccaagctgaaagtgaacacccaggacatcgacctgcgggtcgcccaggcctatatcagcccgtttattcgcctggaattgcgcagcggcatgctgggcagcaacctggacgtgaacctcaaaagcaccgagccactggcccttcaggtcaccggccgcgctcaggttgaccagttgcataccctggacaccctcaagacccgcgacttcctaaaatggcagcgcctggtgctcgaaggcgtgaattaccagcacggccaaagcctgtcgatcgacaaggtcaacttgttgcagccgtatgcgcgcttcatgatcaacgaagatcgcaccaccaacatcgacgacctgctgatcccgcagcccgccgacagcggcagcaagtcggccgccaaacctgccgccagtaacgacaagcccttgggcattcatatcggccagatcgcgatcaacgacggttcggccaactttgccgactttagcctcacgcccaactttgccaccgcgattcaacagctcaacggccagattggcaccatcgacagccgccaggccaaaccggccagcgtcgacatcaagggcaaggtggaccgttacgcgccagtgacgatcaaaggcagcgtgaacccgtttgacccgatggccgcgttggacatcgccaccagcttcaagcgtgtcgagttgaccaacctgacaccttactcgggcaagttcgcaggcttccgcatccgcaagggccgcctgaatctcgatctgcactacgtgatcaccaaaggccagttgaaggctgaaaacaaagtggtggtcgagcaactgcaattgggtgaaaaagtcgacagctccgatgccgtcgacttaccgattcgcctggctgtcgccctgctcaaggactccgacggcaagatctccatcgaactgccggtaagcggcgacctgaacaacccgcaattcagcgtgatgccgattgtgtggcagaccctgcgtaacctcgtggtgcgcgcggcaaccgcgcccttcaagttcattggcgggctggtcaccggtggcggctctgaagacttgggtaatgtgtcgttcgccgcaggctccagtgagctgaacaaagacgccgaaggcgctctgaacaccctggccaaggcgctgaaagaacgccctgccctgcgcctggaaattgaaggcacagccgctgccagcagcgacgggccgttcctggccgcacagcgactggaacgtgaataccaatacaactattacaagatcctccagcgccgcggcgacaaagtcccggcccaggcctcattgcttgaagtaccagagaaggaaaaagcgccattgctggaaggcatctaccgcacccgtctcaaacagcaacccccggccgaatggaaagacctgggcagcgatgagcgctcggcgaagctcaaggacggtgtgatcaagttctggagtggcagtgacgtgctactgcgccagctggggcaggaccgagccagcactatcaaggactacctggtagacaagggccagttggaagacgaccgcgtgtatttcatcgatgcgcagttggggcaggccgagaaagatggccgcgtgatcacgccaatgcacctggatgctgagtaacttctaagcaccgcccacctaacgtggaagctggcttgcctgcgatagcatcacctcggtgcaactgaatgaccgaggtgcccgcatcgcagcataagtatctacacaattttgtaggttgtagcagccgacggtaaccacgatgcgaagcgagtcgctcttgctcttgatcttgctcttgatctcaagcgccccgttaaaccacgctggccgaacgcaagcgaggcgccgagtggtggggcaagagccttttgcttacttttgggctcctttcaaaagtgagccgccgtcaggcggaaccctaagtggccgttaccgcagcaatgaatatgtacacggtccgactgtattgactgtcaggccgtcttcgcaggcaagccagctcccacatttggatcgtggtgtgtcaggcacatctgcgtcggttggtaggtcgtcacgggagcaagctccctcgccacaggttcagcgtcgctgcgaaggtgtgtagacacctatgcgtatcgcaggcagctcccacatttttttggcctgatttctgtttcaacccgaaatagaacaggccccgacacaagtgccggggcctgtaatgaccacatccgtgtggtcggtcgcatgaactccagaggtgcgtcaggtggatatctaactcaccctaagccgccgctattcagttcaaacgaaacgttcagcgttactctgctttcaggccatcggccgagacagctttaacgcctttgattttcttggtgatcgctacagccgtttctttctgtgcagcagtcacggcggtaggcgacgacagggatacaacacccttgttggtttcaaccttgatgtcggtgccaggaatacctttttcagttaccaggtcagccttcactttggtagtgatccaggtatcgctggtggtctctttagcgtcgtgggcagcgcctttggttttgtcgatgccgtcagccttggtagcaccgccagccagcaggccgtcagcagaaaccgcagtcacacctttgattttcttggtgatggctacagcagtcgctttttgcgaatccgagatagctacgtcggaggacagggaaaccacacctttgttggtctcaaccttgatgtccgaacccggaatgcctttttcggtcagcaggtcagctttgactttagtggtgatccaagtatccgaaacgctttccttagccttggtcgcttcaccggccgccaaagtcataggggcttgggaagtctgagcaaaggctacgttagcacccatggccagggtcagagcggtagcagtagcgagagcgaacttcttcatacgagtaactcctgttttattaaaagtctgcagacgtaaaccttcatgctgcagcgctaccagggatattgcaggcagtgtgccaagtcgccgaacagattaaatacctttataaacaatgagttatagaaacagcgtattttcgaaatcgtgcaacttgcatgaagcgcatcgggcctgcatgcaagttgcggcttttgggcagcgctaaacagctgattctgcttcattttctcgcacccataaaaaaaggactccgaagagtcctttttttcagcgtaaagcctgcgggtgtttaaacgcccgaagccttggcggctgctacgtccttgatggacagcttgatacggccgcggttgtccacgtccagtaccagcacttccacttcctggccttctttcagaatgtcggtcactttctcaacccgagcatcgctcagcatggagatgtgaaccagaccgtctttgcctggcaggatgttgacgaacgcgccgaagtcgacgatgcgctcaaccttgccgacgtagatcttgccgatctcggcttcagcggtgatgcccaggacgcgctggcgtgctgcttcagccgcttccttggtttcgccgaagatcttgatcgaaccgtcgtcttcgatgtcgatcgaagccttggtttcttcacagatcgcacggatggtcgcgccgcctttaccgatgacatcacggattttgtcggtgtcgattttcatcgcgatcatggtcggagcattttccgacagttcggtgcgagactgaccaatgatctggttcatctggccgaggatgttcaggcgcgcttccagggcttggcccagggcgatttccatgatctcttcggtgatgcccttgatcttgatgtccatctgcagcgcggtcacacctttagcggtaccggctactttgaagtccatgtcgcccaggtggtcttcgtcacccaggatgtcggtcaggatggcgaacttctcgccttctttaaccaggcccatggcgataccggcaaccggcgccttcatcggcacaccggcgtccatcagagcgagggaagcgccgcaaacggaagccatggagctggaaccgttggactcagtgatttccgatacaacacggatggtgtacgggaacacgtcggcggcaggcagcatggcctgcaccgaacgacgggccagacggccgtgaccgatttcgcgacgacctgcaccgcccatacgaccacactcgcccaccgagaacggagggaagttgtagtgcagcatgaaggggtcttttttctcgccttccagggtgtccagcagttgtgcgtcacgggcagtacccagggtcgcaacgaccaaggcctgggtttcgccacgggtgaacagcgccgaaccgtgagttttcggcagaacgccgacttcgatgttcagcggacgcacggtgcgggtatcgcgaccgtcgatacgtggcttgccgttaacgatgttttcgcgaacggtgcggtattcgatctcaccgaaagcagctttgacttcgctggaagaaggctggccttcttcgccggacagcttggccacgacctggtccttcagctcacccaggcgagcataacggtcggccttgacggtgatggtgtaggcgtcggagatggcagcgccgaactcggagcggatagcgcccagcagttcggtggcttccggggcagcagcccaggtccaggttggcttggcagcttcggcagccaattccttaaccgcgttgatcacaacctggaactcgtcgtgagcaaacagtacggcacccagcatctggtcttcggtcagctctttggcttccgactcaaccatcaatacggcttcggacgtaccggcaacgaccatgtccaggctcgaggctttctgttgctcgtaagtcgggttcagcaggtagccggtgctttcgtggaacgcaacgcgggcagcgccgatcgggccatcgaaaggaataccggagatggccagggcagccgaggtaccgatcatcgcagcgatgtccggatcggtcttcttgctggtggaaacgacggtgcagacaacctgcacttcgttcatgaagccttctgggaacagcggacggatcggacggtcgatcagtcgggaagtcagggtttctttctcggaaggacggccttcgcgcttgaagaaaccgccagggatcttaccggcagcgtaagtcttttcctggtagtgaacggacagagggaagaagcccttgctcgggtcagcggtcttggcgccaacaacggtcaccagtacggtcacgtcgtcgtcaacggtaaccagcactgcgccggaggcttgacgggcgatacggcctgtctcgagggtaacggtcgactgaccgaactggaattttttgataaccgggttcacggtgtcctaccttctttgtggctcttgggggaacttgtcttcttgcgaaattcttgggcaatgccgggaatcggcccgacgctcgtccagggaaaaaacgtgtatccagataaaacttgaggctgggagcctaccacgggccaacgggaatcccgatgacacgcggcagacaaccaacctctagcgcaatcgcttattagcgacgcagacccaggcgaccgatcagagtctgataacgacccagatccttgcctttcaggtagtccagcagcttacggcgctggtttaccatgcggatcagaccacgacgggagtggtggtctttaccgttggccttgaagtgaccttgcagtttgttgatgttgtgggtcagcagtgcaacttgcacttctggcgaaccagtgtcaccaacagcttgctgatagtcagctacgatttgtgctttttcttgaacgtcgagagccatgaggcaatcctttttttaaggaaaccacccaaagggcagtttcaacaggccagggacaaatccctgtatctaaaaatgagtgttgaccatgcctgttaacagccacactcgttccagtttgcgtaaaagctactgcgctttaccacaaactggttccggtcattctgaccgaatcagccgacgcggcgcgatgcgcccgtcttcgctcacttcaccgataccgataaagcgaccgttatgatcttgtactcgcaccatgccgaacttcggggcatccggggcgcgtaccggctggccgttgagccagtagaacgcgctgtgctccgaaaagtgcagcaatggccaatcgagcaaaccgctgtccgatggcatcaggaagcgatcaaccgcttcgttgccgccttcggcgtgcactgcctcaagctcttccagcgtgaccgtctgggccaaggtgaaaggtccggcttgtgtacgtcgcagttcggcaacgtatgcgccacagccaagttgctcaccaatatcctccaccagggtacggatataggtgcctttgctgcagtccacggccaaacgggcagtgtcgccttcacaagcgagcaattccaagcgcgcaatagtaacagaacgcggttcgcgctccactacttcgcccgcacgtgccagcttgtaaagtggctggccatcgcgcttgagtgccgagtacatcggcggtatctgactgatttgcccacgaaaagcgggtaaggcagcttcgatatccgcacgaccaacggtcacgtcgcgaacctgcaaaacatcaccttcggcatctgccgtggtggtggtcttgcccagttgcatcagggtttcgtaacccttgtcggaatcaagcaggtattgcgaaaacttggtggcctcgccaaagcacaacggcaatacaccggtggccaatggatcaaggctgccggtgtgcccggccttctcggcgttgagcagccagcgaaccttctgcaacgcggcattggaggtaaagccaatgggtttgtcgagcagaatgatgccactgacgttgcgacgaatacgtttgacctgagccaccgcttactccttggcgtcttcaggtgtggacggatgctggctgtcttcagccacggcgcgttcgatcagagccgacaggtgcgcgccacgcacgacgctttcgtcgtagtggaagtgcaactgtggaacgctgcgcagcttcatttcacgggccaactgcatacgcaggaaacctgcagcagagttgagcaccttgatgctttgcgcgatttcttcgctgttgtcctgccccatcacggtgatgaagatcttggcgtgacccacgtcacggctcacttcaacagcggtaatggtgaccaggccaacgcgtgggtctttgacttcgcggcggatcagttgggccagctcacgctgcatctgatcgccgatacgctgggtacggctgtattcttttgccatgtcttgttacctgttactgccacacggtgaaacccgtggggtctgaaagcggcaaacgcccggcctgacaaaagccagaccgggcgttgcgtttagagtcctgacgctgcgcggggcatctgcatgcccacacgctgcgcggctcctgaagtgcgcgagttagaggctgcgagcaacctgaaccttctcgaagacttcgatcttgtcgccaaccttgacgtcgttgtagctcttgacgccgataccgcattccatgccggcacgtacttcggcagcgtcatccttgaagcggcgcagggattccagctcgccttcgaagataacgatgtcttcacgcagtacacggattggacggttacggtacacagtgccttcaaccaccatacagccggcgatcgcaccgaatttcggcgagcggaacacgtcacgcacctcggcgatacccaggatgttctcccggacgtcgctgccaagcatgccggtaagggctttcttgacgtcttcgatgatgtcgtagatgacgttgtagtaacgcatgtccaggccttcctgctcgacgatcttgcgagcgccagcatcggcacgcacgttgaagccgaacagtacagcgttggaggccagtgccaggttggcgtcggattcggtgataccaccgacaccgccaccgacaacacgcacttgcacttcgtcgttacccaggccgttcaaggcgccgttcaacgcttcgagggaaccacgaacgtcagatttgaggacgatgttaagcgtcttcttctcttcctggcccatgttctcgaagatgttttccagcttgccggcgtgagcacgggccagcttgacctcgcggaacttgccttgacggaacagagccacttcacgggctttcttctcgtcggccactacgctcatctcgtcgccagcgtccggcgtaccgtccaggccgagaatctcgactgggatagcaggacctgcttccttgattggcttgccgttctcgtcgagcatggcacgtacacggccgtagttcgaaccgaccagcaccatgtcgccttggcgcagggtaccgtcttggaccagcacggtggcaaccgggccacggcccttgtcgagacgggactcaaccacgacgccacggccaggagccgatggagtagcggtcagttccaggacttcggcttgcaacagcaccgcttcgagcagttcgtcaacgccggtacccattttcgccgagactgatacgaatggcgtctcgccaccccattcctcggacgtcacgccgtgaaccgacagttcgctacggatgcgatcgagatcggcgcccggcttgtcgattttgttcacggcaacgaccagaggaacaccggcagccttggcgtgctggacagcttcaatggtctgcggcattacgccgtcgtccgctgcaaccaccaggatcacgatgtcagtcgccttggcaccacgggcacgcattgcggtaaacgcggcgtgacctggggtgtcgaggaaagtgaccatgccgcgttcggtttcaacgtggtatgcaccgatgtgctgggtaataccaccggcttcgcctgcggcaaccttggcacgacggatgtagtcgagcagggaagtcttaccgtggtcaacgtggcccattacggtcacaaccggcgcacgggaaaccgcttcaccttcaaacttcagggactcggccagggaatcttccagggcggtgtcgctgaccagggtcactttgtggcccagctcttcagcaaccaactgggcagtttcctggtccagaacctggttgatggtggctggagtgcccagcttgaacatgaacttgatgatttcagcagccttgaccgacatctgctgggccagatcgcccacagtgatggtctcgccgatcttcacttcacgcacgacagggccggttgggctctggaaaccgtgggcgttgcgcttcttcagcttggccttgccgcgaccaccacgacggaagccatcgctttcttcgtcggtggtacgtggggcaacgcgtggcgcaggcgctttctctttgaccgaggcgcggtgcggagcgtttttacgctcgccatcgccaccaccaccgcgacgattgttatcgtcagcacgtggtttgtccggacgacgaggctcgtcgcgcttgcgggcatctgctgcaggagcaggtgcagcggcagccggggcagcctcacgcacagcttcaacaggggcggcgaccgcgtcagtggcagcaggttgcgcagcagcaggctggcgacgcgcttcttcttcggcgcgacgcttggcttcttcttcagccttctgacgtgcagcgttttctactgcgcgacgttcttccagctcgcgtttgcgctcggcttcgatttcttccgggctgcgctgtacgaagactttcttcttgcgtacttcaacgctgatgctcttgctacctgcaacccgcagggtgctggtggttttgcgctgcaatgtaatcttgcgcggttcttccactttcgccttgtggctgctcttcaagtgagtcagcaaagactgcttctcactatcgctcacaccttcatcggcggcggtgtgcggcagacctgcctcacgcatctgctgcaacaggcgctctaccggtgttttgacctcatcggccagttgtttcaccgtgacttgcgtcatgcacttctctcctcaggccgcgcctaattactcgaaccaatgggctcgggcggccatgatcaacttgccggcacgatcttcgtcaatgccgtcgatgtcgagcagatcgtcaatagactgctcggccaggtcttcgcgggtaattacgccgcgcaccgccagttccatcgccaaatccttgtccataccctcaagcgagagcaggtcttcggccggatgggcgtctgccagcttttcctcagtagcgatggctttagtcaacaaacgatccttggcccgagcgcggagctcgttgacgatatcctcgtcaaagccgtcgatgttgagcatttcttccaacggtacgtaggcaatctcttccaggctggtgaagccttcatctaccagcacctgtgccagttcttcatcgacttccaactcttcgatgaagttgcgcaggatgtcaccggtttcagcttgctgcttagcctggatgtccgattcggtcatcacgttcagggtccaaccggtcagttggctggccagacgcacgttctgaccaccacgaccaatggcctgagccagattgtctgcgccaacggcgatgtccattgcatgggcatcttcgtcaacgataattgccgccacttcagctggcgacatggcgttgatcacgaactgcgccgggttatcgtcccacaggacgatgtccacacgctcaccgcccaattcgcccgacactgcctggacgcgcgaaccgcgcataccgatgcaagcgccttgcgggtcgatgcgtttgtctttggagcggaccgcgatcttggcacgcgaacccgggtcacgggacgcagccatcacttcgatcaggccttcggcgatttccggcacttcgatacggaacagctcgatcagcatttccggcgcggtacgcgacaggatcaactgcgggccgcggttctcggtgcggatttccttgagcagcgcacgcaagcgcacgccgacacggaaggtttcgcgagagatgatgtcttcgcgggccagcaacgcttcggcgttgttgcccaggtcgacgatcacgttgtcgcgggtaacttttttcacggtgccggagatgatttcacccaggcgttcgcgataggcgtcaacgacttgagcgcgctcggcttcgcgaaccttctgcacgatgacctgcttggcggtctgtgcagcaatacggccgaattcgatcgactcgatcttttcttcaacaacatcgccaacctgagcgcccggatgcgtttgcgcaaccttgcttggccaggtttcgattgccggatcatcaagatcgtcctcttcgaccaccgtccaacgacggaaagtctcataggcaccggtgtggcggttgatttccacacgcagatctacttcgtcttcaaaacgtttcttggtagcagtggccagggccagctccaacgcttcaaaaatcacgcttgccggtacacccttttcattggataccgactcaacaaccagcagtacttctttgctcatcgtacgcctcgcctttcgcaagccattggatccgcgggatccgcgtctcagtcaaaactgggaataatgttggccttgtcgatcatatcgatcggcaacaggaactcatggtcttctacctgcaccacgacatcctgatcttctacactgcgcagaaggccctgaaagttgcgtcgcccttcaaagggggagcgcagcttgatcttcacttgttcaccggcatatttagcaaactgctcgagagtgaacagtgggcgttccatgcctggcgaggaaacctcaagggtgtattcaacggagattggatcttcaacatccagcacaccgctgatctgacggctgacaatggcacaatcgtccaccagcacgccgccctctttatcgatataaacgcgcaacattgagtggcgaccttgagccgaaaactcaataccccagcattcatagcctagggccacgaccaccggggccaacaaggcctgcaactcttctagcttgctcgacacctgaaccccctcgtgcatgtatgtgcatgctgtgcaaaataaaaaaatgggcgaaacgcccatccttgaaacgccgtcgaacagcggcgttgaaagtgtccagctaacaaaaagccccttaaaaggggctccgctaaaactggttgcgggggccggatttgaaccgacgaccttcgggttatgagcccgacgagctaccagactgctccaccccgcgacaaagctggggcggaagtatacgaccgatcccttgcagggtcaatgtaaccttccacctacaagaaagcccgcaacagcgggctctcctgataattggtaccgagaaggggactcgaacccctacaccctatgggcacaaccacctcaaggttgcgtgtctaccaattccaccacctcggcaatacagcgcttacaacccttcttacttctgctcttgagctggaggtacgtcagtcgctggagtagccgacttttgctcttgaagcaccgggacatcatcagaagccggttttgcttttggaacttccaacactgctgggtttggcaaacctacttgagtcagcacatgagctttctctttagcaaagtaacctaaccctaagctggttatgaagaaacctgcggcaagtatagcagtaaacttactaagaaaggtagaggaaccttggcttccgaacacagtatttgaagcacctgcaccgaaagacgcaccagcatccgcacctttaccctgttgcaacaaaaccagagcaactacgctcagggcagccaacagatgaaaaacgactacgactgtttccagcattttttcagtttcccgcggcgcgacagatcgcaccgaactcatctgcattcagggaagctccaccaatgagccccccatcgatatccggcatgccgaacagttcgaccgcattggccgccttcacgctgccgccgtatagaagccgcacaccttgtgcgacttcagaattctctgccgccaactgcgcgcggatggctgcgtgcacatcctgcgcctgttgcggtgtagcagtcagcccggtgccaatggcccagaccggctcgtaagcaataactgcctttgcaaatgcaccaacacccagctcctcgatgatgctgcccagctgacgcgagacaacttcaagagtcttgcccgattcgcgctgctcaagggtctcccctatgcacaacaccggaatcaagccacaagcctgtgctgcggcgaatttgcggttgagtgtcccatcccgctcgcccatcatctggcgacgctcggagtgcccgacaagcacataggaacaacccgcatcaaccagctgactcggcgaaatctcgccggtcaacgcaccttgcatcggctctaccgcagagttctgcgcgccgacctgaatcgacttgcccttcaagccatcaaccacttggttgatatgcaagcaaggcgggaacaccgcgacgtcaacaccgctaggcaaggccaagtgacgaaggccgttgatcagctcagcgacactggcgcgggtaccgtgcatcttccagttaccagctaccatagtgcgacgcatgctgtaccccgtcggtcaaagtgggcgcagatgttacccaaccacatcatcactggcaagccgaattcaggcgcaaacttcagttaccagttttgccaggtcttcggcatggccgcgaacctgtgtttcgtcctcgccttcgaccatcacacgcaccagcggctctgtgccggacttgcgcagcaacacacgcccgcgccccgccattgcctgagttacgcgctcgcaagcctctttgacagcagggtgttcgatggggttttcgccaccggaaaaacgcacattgagcagcacttgcgggcacttgcgcagggcttggcgcgcctgggccaggctctcttcgcggcgacgcagggccaacagcacctgtagcgcggcgatgatcgcgtcacccgtggtggtgtgctggaagcaaaccacgtgcccggagttctcgccgccgaccaaccagttacgctccagcagctcggcgatcacgtagcggtcaccgacattggcgcgaataaagggaatccccagttctgccaacgccaattccagcccgagattactcatcagggtgccgaccacgccgccttgcagcttgttacgctcatgcaggtcacgggcaatgatgaacaacaggtcatcaccatccacgatcgtgccagtgtgatccaccatcagcacgcggtcgccatcgccatcaaaagcgatgcccaggtccgcatgctcagccagcactgcagcctgcagctgctccatgtgggtggaaccgcagttgtcgttgatgttcaagccgttgggctgagccgacagcacggtaacctgtgcgcccagttccttgaagacgctcggcgccaccttgtaggtcgccccatgggcgcaatcgacaacaatcttcaagcctgcaaaattggtgctgctcggaacgctgcttttacagaattcgatatagcggcctgacgcgtcgttaatgcgcgacaccttgcccagcttgctggactcgaccaccgtcatcggcgcatccagcagctcttcgatcatcaactcgatctcgtcaggcagcttggtgccctgccccgagaaaaacttgatgccattgtcatcatgaggattgtgggaggcgctgatcacaataccggcttcggcgtggaaggtacgcgtcaggtaagcgattgccggcgtgggcatagggcccaacagcatcacatcggccccagcggcggacaatccggcctccagcgcagactcaaacatgtaacccgaaatacgggtgtccttgcccaccaggatgcgacacgcgcccatgctgcggaacgccatgcctgccgcccaacccagcttgagcatgaaatcaggggtgatcgggaattcgccgacccgaccacgaatgccgtcggtgccaaaatattttttagtcataagtgctccatcattcttattcggctgattctacagcagcgagcatgcgcaccacatcgaccgtttcggcgacatcatgcacacgcaaaatacgtgcgcccttggttacagcaagcgccgcaagcgccaggccgccatacaggcgttcgccgaccgggcgattcaaggcgagccctatcatgctcttgcgcgaaacgccgaccaacagcgggcgaccaagggcgtgcaaggcttccatgtgtttgaacagacttagattgtgctgcagggtcttggcaaagccaaaccccggatcgaggatgatctgctcaggcgcgatacccacagcgacacattgggcgaccctatcagcaagaaacccactgacctcaccgaccagatcgtcgtaatgcggattgtcttgcatgttgccgggctcacccagcatatgcatcaggcagacaggcaagccggttgcagcggccgcatcaagggcgccgtcgcgctgaagcgaacgcacatcgttgatcaaccccgctccgagccgcgcggtttcgcgcatcactgctggggtggaggtgtctaccgagatgatgacatccagctcacgggcaatgcgctcaaccacgggcgccacccgctccagctcctccaaaggagaaacaacgcgggcgccggggcgggtcgactcccctcccacatcaatcagcgtcgcaccggcagccaccatcgcctcggcgtggcgcaacgcggcatccagctgactgaagcggccaccatcggaaaaggagtcaggggttacattgaggatgcccatgacatgcgtccgggccaaatcaagaacccggttgccgcaaggcaaccgggtagaggacaaagcagaagtcatttcaaaccttagtgatcagctgccgggccgccgataggcgtttcagggcgctcattctgcaccacaggcggagtgcccgaagtacccgaaccaccttcccagtcgcgcggctcacgcggcgtacggcccgccatgatgtcgtcgatctggtcggcatcgatggtttcgtacttcatcaacgcatcagccatggcgtccagcttgtcacggttgtcagtcaaaatctgcttggccgtgccatagcactggtcaatgatgctgcgaacttcggagtcgatcagcttggctgtctcacccgagaagctggcgctttgcccaccgccgccacgccccaggaacacttcgccttcctcttcggcgtacatcaatgggccgagtttttccgacaagccccacttggtcaccatgtttcgtgcgatctggctggcacgcatgatgtcattggaggcaccagtggtcacaccgtcgaagccaagggtcatttcctcagcaatacgaccgccatacagcgagcagatctgactgatcagcgcacgcttggagaggctgtagcgatcctcttccggcaggaacatggtcacaccgagtgcccggccacgaggaatgatcgacactttatagacagggtcatgctcaggcacaacgcgacctacaatggcgtgacctgcctcgtgataagcggtgttctgcttctctttctcggacatgaccatggatttgcgctcggcgcccatcatgatcttgtctttcgccaattcgaactctttcatctcaacgatgcgcttgccagtacgggcagcgaacagcgaagcctcgtttaccaggttcgccagatcagcaccggagaaaccgggagtaccacgggcgatcacagccggagccacgtcgtcacccattggcaccttgcgcatgtgtactttcaggatctgctcacgaccacgaatgtccggcaggccgaccacaacctgacggtcgaaacggcccggacgcagcaacgcagggtcgagaacgtcgggacggttggttgcggcgatgacgataatgccgtcattcatctcgaaaccatccatctctaccagcaactggttgagggtctgctcacgctcatcgtgaccaccccccatgcccgcgccacgatggcgaccaacggcatcgatttcgtcgatgaagatgatgcatggcgcgtgcttcttggcctgctcgaacatatcgcgaacacggctggcgccgacgccgacaaacatctcgacgaagtcagaaccggaaatcgtgaagaaaggcaccttggcttcgccggcaatcgccttggccagcaaggttttaccggtacccggaggccccaccatcagcacaccgcgaggaatacggccacccaggcgctggaacttgcccggatcacgcaggaactcgaccaactcaccgacttcttccttggcttcgtcgcaacctgcgacgtcagccagggtggtcttcacctggtcttcggagagcaggcgcgccttgcttttgccgaagctcatcggcccgcccttgcctcccgcaccgccttgcatctggcgcatgaagaacatgaacacggcgataatcaccaggatcgggaagctggccaccaggagctgggtccagatgctttgctgttcaggctgcttgccttccacaacgaccttgttatccaccaggtcaccgatgagaccgttgtcctgaatggcaggacgaatggtcttgaagctgtcgccatcgttgcgcttaccggtaatcacgtagccatcaaccgctacgcgctcgaccttgccatccttaacttgctggatgaagtcggaatagttgagggtctgcggctcgttagggctggagaagttgttcatcaccgtcaccaggacagccgcgatgatcaaccacaggatcagattctttgccatatcgttcaattaactaccctctgaagcaagctccgctactggcgcgcgcttcgcatgatattcaccggcctaacttactacattacctacaactctggcaggcgccgtctgtaaccctttgtgaaactttgactacgcaatattcgtaaagcttcgtgacgaaagcgatataaaaaaacctatcgccctcctcgaatttctcaaaaacgctcttcgctcgcagcgccttcgacaccgcggaagccacggcacagcagatactgctccctggaccggtcacgggatgagtccggcttgcgtgtctgtaccttgtcgaacaacttgcgaatgttcttgtggtactcgtcgaaaccttcgccctggaagaccttcaccaggaaatcgccacccggacgcaacacccgacctgccagatccagcgccagttcacacaggaacatggcacgcggcatatcaacagccggtaatccactcatattgggggccatgtcggaaatcacaaggtctacctgcgaatttcccacagcctccaggatctcggccaataccttgtcctcggtgaaatcgccgtgaacaaaggtcacgtccgggatgctatccatctcgaggatgtccgaagcgatcaatcgaccttgcccaccaatcagacgactggtcacctgggaccagccaccgggggccgcgccgagatcgataacgctcatgcctggacggatcagtttgtccttgtcctggatctccagcagcttgtagctggcacgggaacgatagccgtccttttgcgcctttttgacgtaaggatcattgaaatgttcttgtagccacttaaggctggttttggaacgggccacgggccacctcgaaaaaataaaacgggtcgtgattaactgggcggtcccggactcgctcgggtaaactggccgccgctttttacaagatcagacgcaggggtcagattatgccgctcactcaagagcagaagaaacagtacaaatccattggccaccatctgaaaccagttctgattgtggcagacaacggtttgactgagggtgtgctagccgaattcgagcgcgcactgaacgatcacgaactgatcaagatcaaggtcaacatccttgatcgcgaagcgcgcctggccgccgttgcagaactgtgcaaggtcggcaaagcggacctggttcaggtcatcggcaagatggcgctgctgtatcgcaagaacttcagcgtcaacaagcaactgtcgaacgttcatcgcttcaaatgatgaaaagggtcaagggcgtgcttcgcgcgccccgccactccatcccggcgcaggctgcataaccagcaccaggccagagaaccctagcacaagatagctgaataactgccagcgcaacgcttgcggcagccacacatgcaccacgcaaaacatcgcgcatgcatacagcgccatcaacagcagttgcccgcgaatatcccgccacaaactcttcaggccttcagccttgaccagcaccaacacctgaagcagcacgcacgtcgccgcaaaacccaccagcagcgcactcagcaatccgtcgatctcatcgatcagcagcggcgccaagccaatcaggcccaacgccggcaatacaccaatatgtaacagccataggccgcccacccaaagcatctgagcgagctgccaaagcatggcgcccgcacgcagcgggcgccgtctttcagatgtgacgaacttcgacaatctcgtactcgatcacgccacccggcgtcttgacggccaccacatcaccctcttccttggcaatcaaggcgcgggccagcggcgaaccaacagagatcttgccgagtttgaagtcagcttcatcttcacccacgatgtgatagacaacgcgctcatcagtctcgacgttggcgatctctacagtggtgccgaaaatcactttaccggtatgagggatggaggtgacatcaatgatgacctgattctgaatccggccttcgatgtcacgaatccgcgcctcgaccatcccctgctgctcgcgagcagcgtggtattcagcgttttccttcaagtcacccagctcgcgggccgtaccgatgtcctgactcagcttcggacgtacgaccttggtcagatgggcgtgttcctcttccagggccttggcgccctggacggtcattgggtatttgatcatgccttcaatcctgcgtgtagatcctgcaagcgacgcacggtcttttccggaccgaacttgagcgcttcacagatagcttcgccagcagcaatggtagtggtgcagtaaatcttgtgctgcaaggcattacgacgaatggaataggagtccgcgatcgactgacgaccttcggtggtgttgatgatcagggtgacttcgtcattcttgatcatgtcgaccacatgcggacggccttccgtcaccttgtttacgcgacgtactttcaggccggcagcttcgatcagcttggcggtcccggcggtagccacgacttcaaagcccaagttgatcagatcgcgggcaacccctgcaaccagtggcttgtcgtcatcacgcacgctgataaacgcagtaccaccggtcggcagcacttcgctggcgcccatctgggccttggcgaacgcttcaccgaaggtatcgcccacgcccatcacttcaccggtggacttcatctctgggcccaggatcgggtccacgccagggaatttggcgaacgggaacactgcctctttcacgctgtagaagttcggaatgatttccttggtaaagccgatttccttcagggtcttaccggccatcacgcgagcggcgatcatggccagggacacaccgatgcacttggacacaaacggtacggtacgcgaagcacgcgggttgacttcaatgacgtagatatcttcgccttgcagcgccaactgtacgttcatcaggccgacaacgcccagctcgagggccattttcttgacctgttcgcgcatctcatcctggatgtgcgccggcagcgagtacggcggcagcgagcacgcggagtcaccggagtgaacgccggcttgctcgatgtgctgcatgatcgcgccgatcactacgtcggtgccgtcgcagaccgcatccacgtccatttcgatggcgcagttgaggaagtggtccagcagcaccgggctgtcgttggagactttcaccgcatcacgcaggtaacgcttgagttcttcttcttcgtagacgatttccatcgcccggccgcccagtacgtaggacggacgcaccaccagcgggtagccgatcttgctggccgcacgaatggcttcgtcttcgctgcgcacggtggcgttcggcggctgacgcaggttcaggcgctcaaccatttgctggaaacgctcacggtcttcggcacggtcgatagcatccgggctggtaccgatgatcggcacgccagcggcttcgagggcgcgcgccaatttcagcggggtctggccgccgtactggacgatcacgcctttaggcttctcgacgcggcagatttccaagacgtcttccagggttaccggctcgaagtacaggcggtcggaagtgtcgtagtcagtggaaaccgtttccgggttgcagttgaccatgatggtctcgtacccgtcttcgcgcagggcgagggcggcgtgtacgcagcaatagtcgaactcgatgccctggccgatacggttcggaccgccacccaggatgatgatcttgtcgcggcccgtcggcgcggcttcgcactcttcttcataagttgagtacatgtaggccgtgtcggtggcgaattctgcggcgcaggtgtcaacgcgcttgtagaccgggaagatatccagcttgtggcgatgagtgcgcaggttcttctcggtcacacccagcagcttggccagacgctggtcggagaaacctttgcgcttgaggcggaacatcaagtcgcgatcgatagacgacagacccagcgtcttgaccttctcttcttctttgatcagatcttcgatctgcaccaggaaccacgggtcgatcatgttcatgccgaagatatcttcgacgctcaggccggcacggaaggcgtcagccacgtaccagatacgctcggcgcccggcacggtcagctcgcgcttgaggatgctcatgctttccgggttgctcaggtcgagcttttcgtccaggccgcaaacgccgacttccagaccgcgcagcgctttctgcagggattcctggaaagtacggccgattgccatgacttcaccgaccgacttcatctgggtggtcaggcgcgcatcagccttggcgaatttctcgaaggcaaagcgcggcagcttggtcacgacgtagtcgatagacggctcgaaagacgccggcatagcgccgccggtgatttcgttttgcagctcgtccagggtgtagccgatagccagcttggcagcgatacgcgcaatcgggaagccagtcgctttcgaggccagcgccgaagaacgcgatacacgtgggttcatctcgatcacgaccatgcggccggtgtccgggcagatgccgaactggacgttggagccgccggtttcaacgccgatctcgcgcagtaccgccagggaggcgttacgcaggatctggtattccttgtcggtcagggtctgtgctggcgccacggtgatcgagtcaccggtgtgcacgcccatcgggtcgaagttttcgatggagcagacgatgatgcagttgtccttcttatcgcggacaacctccatctcatattctttccagccgatcagggattcgtcgatcagcagctctttggtcggcgacaggtccaggccgcgagcgcagatttcttcgaactcttcacggttgtaggcaataccgccaccggtgccgcccatggtgaaggacgggcggatgatgcacgggaagcccagggtctcgaggaccgcgttggcctcttccatgctgtgggcgataccggaacgtgggcacgccaggccgatagacttcatggccttgtcgaaacgcgaacggtcttcagccttgtcgatggtgtcggcattggcaccgatcatctctacgccgaacttttccaggacgccttcgcgctccaggtccagggcgcagttcagagcggtctggccacccatggttggcagcagcgcgtccggacgctctttctcgatgatcttggcaacggtctgccacttgatcggctcgatgtaggtggcgtcggccatggccgggtcggtcatgatggtggccgggttggagttcaccaggatgacgcgatagccctcctcgcgcagagctttacaggcctgggcgccggagtagtcgaattcgcaggcctggccgatcacgatcgggccagcgccgagaatcaggatgctttttatgtctgtacgttttggcatgggtttgtcactcaaatccgcaggtcagtcggcaagccgtcttgaacaatctttgaagagcctgcgggggccaccgcaatccggggccgcccgcaggccactcagtcagcgtcgcttggccatctcattgatgaaacggtcgaacagcggcgctacgtcgttcgggcccgggctggcttcagggtggccctggaagctgaacgcgctcttgtcggtgcgctcgatgccttgcagggaaccgtcgaacagcgacttgtgaatggcgcgcacgttgctcggcagggaggcttcatccaccgcaaaaccgtggttctggctggtgatcatcacaacgccggtgtccaggtcttgtaccgggtggttggcaccgtggtggccgtggcccattttcagggtcttggcgccggaggccaaagccagcaactggtggccaaggcagatgccgaacaccggaatctcggtctccagcacatccttgatggcctggatagcgtagtcgcatggctcagggtcacccgggccgttggacaggaacacgccgtccggctgcatcgcgagcacatcgctggcaggcgtttgcgcgggtaccacggtcacgcggcagccacgctcgaccaacatgcgcaggatgttgtacttgacgccgtagtcataagccaccacgtggtaaggcagatcggcagcctcgatagtcgcgtggctgtcggtcttcagatcccacacagtggaacgccactcgtacttctctttgacgctgacgactttcgccaggtccatgcccttcaggccagggaaaccttgcgccgcggcaatcgccgcctcttcggagatattgtcaccgaccatgatgcagccgttctgcgagcctttttcacgcaggatgcgcgtgaggcggcgcgtatcgataccggcgatcgccacaacgttgttggctttcaggtaatcggacagcgacatcgtgttacgccagttgctcgcaaccagtggcaggtcacgaatcaccaggcccgccgaccagacacgatcagactcgacatcttccggcgtggtgccggtgttgccgatgtgcggataggtcagggtaacgatctgttgggcgtaggaaggatcggtaaggatttcctgatagccggtcatggcggtgttaaacaccacctctccaacggtttgaccgtcggctccaatggcttcgccgcgaaaaatgctgccatcagcaagggcgagtatggctggcttagtcaagaagacctcccgtaaataaagcctgaaagggcgatcgcaggttgtaaaaaagcggagtgacgtatggacacgtcaccccgcttcttcactgaattattctgcgcgcttttagtggacacactaaagctgtagcttacagaaaaaggcttttttggtccaccgctaatgagccttaaaggcaggggaatgcgacaggacgtcgcctagcgggtaaaaacagggccacaggataatcctgaggccccgttttagctactgcttagtgcaggtccagcacgtcacgcatgtcgtacaggcccggctcacgcccttccaaccagagtgcagcacgcactgcgcccttggcgaaggtcatgcggctggaggctttgtgggtgatttccaggcgctcaccttcggtggcaaacagcaccgtgtgatcaccgaccacatcaccaccgcgcacggtcgcgaaaccaatggtgtcacgcgcacgcgcaccggtatggccctcacgcccgtacaccgccactttcgacagatcgcgacccagcgcatcggcaatggcttcacccatgcgcaaggccgtgcccgaaggcgcgtcgatcttgtggcgatgatgggtctcgataatctcgatatccgcttcatcccccagcacacgcgccgccaggtccagcaacttcagcgacaggttcacacccacgctgaaattggccgcgaagacgatcggaatatccttgcccgcctccaccagcaagtgcttctgctcggcactcaaaccggtcgtgccgatcaccatggccttgcctgccttgcggcagaaggccagatttttcagcatcacttccggcagggtgaagtcgatcagcacgtcgaattcgtcagccacctgctcaaggttgccagacagcgaaacaccgatgcgacccaatgaggccaactcacctgcgtccgcgccgatcaacgtactgcctgggcgaacaatcgccgccgtcagcccggaggccggcgagcgttgctgcaccgcctcgaccagcgtcttgcccatgcgcccggcagcgcccattacggctatacgtcgcatattcagatccttacaggtcgccgaagaagcgttttacaccgtcgaagaagcctgtggtcttcggtgagtgcgagtcatcgccttccagcgagctgcggaactcttccagcagttcacgctgacgacgattcaggttcacgggggtttcaaccgccacacgacacatcaggtcgccagcaccgccaccacgcacgggcgcaacgcctttgccacgaatgcggaactgcttgccggtttgagtcccctcgggaatcttgagcttgacccgaccatccagcgtcggaatctccagctcgccacccagggccgcatcaacaaagctgatcggcacttcgcagaacaagtgcttgccgtcacgctggaagatcgagtgctcgcgcacattgatcaccacgtacaggtcgcctgtagggccaccctgggcacccgcctcgccttcgcccgacaggcgaatacgatcaccggtatccacacccgcaggcactttcaccgacagcgtcttgtactcttcgacgcggccttcgccgtggcaggagtcgcacggatcggaaatgatcttgccctggccatggcaacgcgggcaggtttgctgcaccgagaagaagccctgttgcatgcgcacctgcccaataccgccgcaggtcgggcacgtgatcggcgaggagcctttcttcgcacccgagccgtcgcacggcttgcagttgaccagcgtcggcacacggatattgacactggtgccgcgcacggcttcttccaggttcagttccagggtgtaacgcaggtcgctgccgcgctgagggccgccacgctgaccgccacggccaccgccgaagaagtcgctgaatacgtcgccgaaaatatcggagaagttctgaccaccaaaaccggcaccgccgccgcccatgcttgggtcgacaccggcatggccatactggtcgtaggctgcacgcttattgggatcacacaggcattcgtaggcctcgttggcctctttgaacatctcttcggattctttgttatccggattacggtccgggtggtgcttcatcgccaggcgacggtaggcctttttcagctccgcctcgctggcgccacgctccacacccaatacttcgtaatagtcacgctttgccataagtctttgcactcttaaggacgttcgacctggccctcctgaaccctgccaaactcgttgagccccaatacaggcccggacccaactcacgtcaattcaacgatcctggtcattactgctttcagccagggacccggccaaaaacgcggtgactgtcattcggaaagcaggagcattcccgttcacaccgccagcatccgagcgttgtcgcatgctgtaaaaattcgcataccccagacacgccaacgcgggagcaagctcccgcgcggcgacatcctaccagtcaccgcttgtgtgcggtcaaccgggcgaccaagttacttcttctggtcgtctttaacttcttcgaactcggcatcgacaacgtcgtcatgcttggcttcaggctctgcttgttgcgcagcgccgtcagccggctggccttgttcggcgtacattttctgagcaactggcgcggagactttcgacagttcctcaaccttggcttcgatggcagccttgtcgtcgcctttgatggcggcttccagggcaaccactgccgcttcgattgcggttttctcttcgtcggtcactttgtcgccagcatcagcgatcattttgcgcgtcgagtgaaccagcgcgtcaccctggttacgagcgcccgccaactcttcgaacttcttgtccgcttcagcattggtttcagcatcacggatcatctgttgaatttcttcatcagacaggccggagttggccttgatggtgatcttctgctctttgccggtggccttgtctttcgcgccgacgtgcaggatgccgttggcgtcgatgtcgaaggtcacttcgatttgtggcacgccacgtggtgctggtggaatctcagccaggtcgaacttgcccagggacttgttctgcgcagcttgcttacgctcgccctgcagcacgtggatagtcacggcgccctggttgtcatcggcagtcgagaacacctgggatttcttggtaggaatcgtggtgtttttctcgatcagcgcagtcatcacgccacccatggtttcgatacccagggtcagcgggcttacgtccagcagcaacacgtctttcacgtcaccggccagtacggcaccctggatggcagcacccatggcaacggcttcgtccgggttcacgtctttacgagcttctttgccgaagaactcggtgaccagcttctgaaccagtggcatacgggtctgaccgcccaccaggatcacgtcgttgatagagccaacgtcgataccggagtctttcagcgcgatacggcaaggttcgatggtgcgctgaaccaggtcttcaaccagtgcttcgagcttggaacgcgagattttcacgttcaagtgcttaggaccggtagcgtctgcagtgatgtacggcaggttcacgtcggtcgactgagcggaagacagctcgatcttggctttttcagcggcttctttcaggcgctgcatggccagcgggtcacctttgaggttcatgccgctttctttcttgaattcgtcaacgaggtagtcgatcagacgaatgtcaaagtcttcaccacccaggaaggtgtcaccgttggtggccaacacttcaaactggtgctcgccgtcaacttctgcgatctcgatcacggagacgtcgaatgtaccgccacccaggtcgtaaacgatcacggtgtgatcgcccttggccttgtccataccgtaagccagagcagctgcggttggttcgttgatgatacgttttacatccaggcccgcgatgcggccggcgtctttggtggcctgacgctggctgtcgttgaagtaggcaggaacggtgatcaccgcttcagtcactgcttcaccgaggtagtcttcggcggtcttcttcatctttttcaagatttcagccgagatttgtggcggcgacatcttctggccgttcacttcaacccaggcgtcaccgttgtcggccttggcgattttgtaaggcaccatcttgatgtctttctgtacgacttcttcgtcgaacttacgaccgatcagacgctttaccgcgtacagggtgttgtgcgggttggtcactgcctgacgcttggccgattggccgacgaggatttcaccgtcgttggcgtaagcgatgatcgacggggtggtacgtgcgccttcggcgttttcaataacttttgcaacgccgttttccagcacggagacgcaggagttggtagtccccaggtcgataccgataattttgcccatgatttactctcccgaaacttgaatttggttgccgcagcagttttggctaactgcggtagcacttaaacgcttgacttataaatgggggccttgcggcgtatttcaagcctgctcatcaatagaaggtgcaacgggtgcaggagccttgctcaccaccaccattgccgggcgcatcaggcgaccgttgagctggtaacccttctggaacaccttgatcacgctattgggttccaggtcatggctttcctgcatggccatggcttggtgatgcccagcattgaacggctcgccggcttgcggatcaatcgcttccaactgataacgcttcagggtgtcctggaacattttcagggtcagctcaatgccttcgcgcattgggcggatgttttcgtcgtccgggttggacaactcaagaccacgctccaggctgtcgatgatcggcagcaggtcaccggcgaatttttccagcgcgaacttgtgagccttctctacatcctgctcggcacggcggcggacgttctgcagatcggcggcaacacgcaacgattgatcctgcgcagcggccaattgctcttcgagcacctgcacacgagtcgccagttcatcaccggcagccgaattggcgtctggagtttgcgtatcctgcgtctgttcgtcagccatagatttctcctttcaaaatcatgcgcgaactcaactcgcgcttctgctccggtatatggggccacaattttcaggttcaagggcgcaggcgttaccaaaagtctttcgattgacctggatcatttccttcacgctcattccacatcgcgctaaaaaaaatcgcgactcaagcaaatcgagctaaacgccaggattgtcaggcctgaacaaaacactgtataaataaccagacctaaagcctgggagcggccgtcatgctcgtgcacctgtctgtacataactacgccatcgttgaacacctggatctcgaactggatcgcgggatgagcgtaatcacaggcgaaaccggcgccggcaagtcgatcatgctcgacgccctcggcctgaccctcggcgaccgcgccgacagtggcgtggtacgccctggctccgacaaggccgacattctggccaccttcgacctggcggacatccccgaagccgaggcatggctggccgagcgcgaccttaataatgaaggcccctgcattctgcgccgggtgatcaccgccgaggggcgctcccgcggctatatcaacggtacgccttgcccactgggcgacctgaaagccctgggtgaattgctgattgatatccacagtcagcacgaacaccaatccctgttgaaaaccgatacccaccgccgcctgctcgatgagtacgccggtgccaccgacctttcccggcaagtacaactggccgcccaacgctggcgccagacacgccaggaactggaacgcctctccaactccggcgacgaacaacgcgcccgccaccagttgctcagctatcaattggaagagctcgaaagcctgggcctgggtgagaccgagctggaacagcttgagcaggaacacaagaacctgaccaacgccgaaaccctgctgggcatctgccgccaggtggtcgaacaatgtagcgagagcgactccggcaatgtgctcaacgcactgaccgccagcctcaatcgcctgtccagcgtgaacaatgcttctggctcgctgagtgaagcgaccaccctgctgaccagcgcgcagatccaggttgaagaggccgtgggcgaactcaatcgtttcctggatcacttcgacgccgacccagctcgcctgcaggaaatagaggagcgcctggacactatttataccctggctcgcaagcatcgaatccagccgactgaagtcgcaaccatgcagcagaaactgctggatgaaatcgaaacactcaacgcgaacgacgaatccatcgagcgcctgggcgaagagctcgcttcgtttgcccgtcattatcaggaaaaggcccgggagctgagcgccctgcgccagcaagcagccaccagcctggccagcgccgttgagctggaaatccaacgcctgggcatgccaggcgggcgcttcaccatcgagctgcatcccaacgccagtcaagaattgcagccccatgggctggagcacgtcgaactgctggtgagtgccaaccccggccaaccgctcaaggctctggccaaagtggcctccggcggcgaactgtcgcgcatcagcctggcgatccaggtgattaccgcccagacctcacgggtacccaccctggtattcgatgaagtggatgtgggcattggcgggccgaccgcagaaatcgttggccaattgctgcgccgcctgggggatcgcggccaggtgcttacggtgacccacttgccgcaagtggcagcccaagggcatcagcacctgtttgtgcacaaggtgcgcggtagtgacgcgacacacacagccgtctccaagctgaacaagtcggaacgggtagaagaagtggcgcggatgcttggtggtatcgacttgaccaaggagtccttggctcacgcgaaaaaaatggtggtagccgcgaaggcttgaagcgacacctttccctcttatagaaagcacgaaggcgacccgagggtcgccttcaatcgtttcgcaaagcaaaactgcgtcgatttttactttttcttacggatgtacaacacgagattgtgatcgaccaaatcgaacccatgctcctcagcaatcttgtgctgtagcgcttcgatttcagggctggtgaactcgataacctcattggtatccaggtcaaccatgtggtcatggtgaccaccgtcagccaattcaaacaccgcatgaccgccgtcgaaattatgacgaaccaccagccctgcggcttcaaactgggtcagtacacggtagaccgtggccaggccgacgtcctcgttagactccatcagcgccttgtaaacgtcttcggcactcatgtggcgctgctcagcagaatcgagcatttgtagaatcttgactcgtggcagagtcactttgagaccggctttgcgtagttcgctattttcaaccatggttagctttctcgcggatgctgcttcgcagcttctcttaatacgggtatgatcggcgtttacgttgtcccagccaagatagtggaagtcgcccaccgatgcaaaacaccaagctcttgctaaccagtttcacctttgtgggactgctcgcactcgccggttgttcattccccggggtttacaaaatcgacatccagcagggcaatgtcgtcacgcaggacatgatagaccagttacgcccgggaatgacccgacggcaagtacggtttatcatgggtaatcccctgctgaccgacactttccatgccgatcgctgggattatctgtacagcctgcagcctggtggcggtgaacgccagcaggagcgcgtcagtgtcatcttcaatggcaatgaccagctcgtgagcctgtccggtgacttcatgcccggcgtaagccgcgatgaagccttgctgggcaaggacagcggcaccaacgtgaccgcccctgcgcaggaagccgaaaaaccaaaatccgaggtaccggccaagccaggttcgttgctggacagcatccagaaagacatcgacaacgtggaaaccgtgcccgtgccgacgcctgagcctctggacaccagcccgcaataattttgcgctcgataaaaagcccggcatgccgggctttttgttgcctgccatttgcatagctatattgcccacagcatcagcgcctggcaccaatcccctgtgggagcgggcttgctcgcgaaggcggtgtgtcagtcaattaatcttcaactgaaccaccgccatcgcaggcaaccccgctcccgcagttggatcgcggggttccagggagatatgtgtcagttggcaggccattacgggttcagcttcgtatcgcagcggtgcagatagctacgctgccatttggcaagctcaagaattcgcttgcctggccaatgccgccttggccgcgcgcaacctgcgcacctctttagggtcggccagtaaaggccgatagatctcaatacggtcaccggcttgtacgcagcgcacctgtgcatccacgacgaccttgccaaagatacccaccgggcaatcagccagatcaacatcaggaaaatgcgctgccattcccgacgcccgcaccgcctcgcgtaaactagtgccttcagccacctttacccccagcaacacctggcgatcctcagcggcgaacaccacctcaatctcaaccatgcagttgcttggcgcgctgacagaacgcgtccaccaaggtattggctgcctgattgaacaaaggccctaacgtcgcacgaacaatcggcccggcataatcaaacgaaagatccaggctgatcttgcaggccttgtccgtcagcgccttgaacacccacacaccgtgcagttgggtgaacggcccttcctgcaggttcatttcaatggattgacccggcaccagcacattgcgcgtcacaaaatgctggctgaggccgcccttggccactcccacactggcaaccatgtgctcgtcactgctctccagaacctcggccgtcgagcaccaaggcagaaactctgggtaacgcgccacgtcgttgaccaggtcatagagcgcctgcgccgggtagggcaacagggccgaacgttgaatatgcgtcgtcatgtgagcgttacttccactgcttaaggcaaacatcgcgaaagaacagcccaatccgcgagagaaaaaaaccaaagaactgcccgcattgtccgggattcgtccaactcgctcaagcacacaggttgaccgtagccgacacgctcgcaactccctataatgccgcccctatggctaaacaaaagaaacaccccacagggaccatcgcgcaaaataaaaaagcgcgacacgattacttcatcgaacatcggttcgaggctggtctggtcctggccggctgggaagtaaaaagtctgcgtgccagcaaactgcagctggtcgacagttatgtgctgctcaaggatggcgaggcatggctgcttggcagtcatatcactccgctgaccaccgcgagcacccacgtgattgccgacccggtgcgtacgcgcaagttgttgctcaatgcccgcgagctcgaaaaactcgccgcagccgtgcagcaaaaaggctacgcgtgtgtctgcttgtcctggtactggagcaagcacctggtcaaatgcgagatcgcattgggcaagggcaagaaggaatacgacaagcgcgacaccgaacgcgagcgcgattctaatcgcgaactgcatcgcgccgtgcgcaacaagggcaaggaagaataatccttgtgacggtgtagcccacgcgggctacatccctttgcgtcgctccgcccgagccacgcgttgaacctcctgacgcacctcctccaacacctcctgcacatacagcagatgccgtgtcgagacttcgcgcgcctgctcggcccgcccctcgatgatggccaggtacaagtcccgatgctgattgatcagcatgtcgcgggtctcggtacgctgctggtacatgccaccaatattcgtcaccacgttacgcttgagcaggtcgaacagcccgcgaatggtgtgcagcaacacggcgttatgactggcttcggcaatcgccaagtgaaaccttgcatccgcagcaccctcctccactcgactcacttcgtcggcgcgcgcatagcaatcctgcaacgcttcaaacgctgcggtcagccgttcacggtcaacctccgtggcgcgtaacgccgcgtaataagcacacgaagcctcaagggtctggcgaaactccagcagatcgcgttgcgcttcgggattgctttccaacaaatgcagcagcggatcactgaaggtcgaacccagggagtccaccacatagttgccaccgccctggcgactgaccagtaaccccttggccgccagcttctgaatcgcctcacgcaacgatgggcgcgacacaccaaagcgctcagccagcgcgcgctcggccggcaagcgctcgcccgacttcagcgtgccctcgagaatcatgccctcaagctgctcgacaatatcgtcagacaaacggcgctgacgcacctgatcaaaccccataactcaactctccaccatcccgaccactcgccggggcccctattctggcctatcgacgtgccggcagcacctatcagaacgccttcaatttcgctgatcagaacgccccgcctcccgacctacgaccaaagtttcgcaggcggcaaattgacacacccctgcccagcctcttaatctagcccacagcgattgtaaattggtattaccaattacccaagctcaccaaacaacaacaatcaggggccaccccatatgcaaacctggcaacagctttacagcccactcggcagcctcggcctgtccgcactggccgccgtcgttcccatcgtattcttcttcctggcgctggccgtgctccgcctcaaaggccatgtggccggcagcatcaccctggccctgtcgatcctggtcgccattttcgccttccagatgccggtagacatggcgctggctgcggccggttatggttttgcctacggcctgtggcccatcgcctggatcatcgtcgcggcggtattcctgtacaaattgacggtcaagagcggccagttcgagatcattcgcagctccgtcttgtcgatcaccgatgaccagcgcttgcaggtgctgctgatcggcttctgctttggtgccttcctggaaggtgccgccggtttcggcgcgcccgtggcgatcaccgccgcgctgctggtgggcctgggcttcaaccctctgtacgccgccggcttgtgcctgattgccaataccgcgcccgtggctttcggcgcattgggcattccgatcatcgtcgccggccaggtcaccggcattgatgcgttcaagattggcgccatgaccggccgccaactgccgctgctgtcgctgttcgtgccgttctggctggtgttcatgatggacggcctgcgcggcgttcgcgaaacctggccggcagccttggtggccggcttgagctttgccgtcacccaatatttcacctccaacttcattggcccagagctgccggacatcacctcggcactcgccagcctgattgccctgacgctgttcctgaaggtctggcaacccaagcgcaccgcaggcgcacaaattgccggcgccacctccagcgtagcggtcacttccagcgccggcggcttcggcttgccacgcaacaccgtggtttcgccctacagcctggggcaaattttcaaggcgtggtcgccgttcctgatcctcaccgtactggtgaccatctggactctcaaacccttcaaggccctgttcgccgcgggcggctcgatgtacggctgggtgttcaatttcgcgatcccgcacctggatcaactggtggttaaagtcgcgcccatcgtgaccaaccccaccgccatcccggccgttttcaagctggacccgatttcggccaccggtactgcaatcttcttctcggcactggtctccatgctggtgttgaaaatcgacgtcaaaactggtcttaccactttaaaagaaaccttctttgagctgcgctggccgatcctgtccatcggcatggtgctggcattcgccttcgtcaccaactactccggcatgtcctcgaccatggccctggttctggccggcaccggtgctgccttcccgttcttctcgccattcctcggctggctgggagttttcctgacaggctccgatacctcatccaacgccctgttcagctcactgcaagccactaccgcgcaccagatcggcgtcaacgacacgctgctggtagcagcgaacaccagcggtggcgtgaccggcaaaatgatctcgccgcaatcgatcgccgtggcctgcgccgccaccggcctggtgggcaaggaatccgacctgttccgctttaccctcaagcacagcctgttttttgccaccatcgtcgggctgatcaccttggcgcaggcgtactggttcaccggtatgctggtgcactgagacctgcacgtaatagggtaagaatcgacgccggggcatccttccggcgtctgctatttctggaggaccgatgagcctgcctgctgctttcctgagcgacgtcgcacaactgatcccgcaagatcgccgcttcgacgatccactttccaccctcgccttcggcaccgacgccagcttctaccgactgatcccacaactggtgatccgcgtggagtcagaagacgaagtggtgacactgctgcaactggcccagcgcgaccgcgtgccggtgaccttccgtgccgcaggcaccagcctctcgggccaggccatcagcgactcggtgctgatcgtgctgggtgataactggaaccaccgcgaaattcgcgggcaaggcacccagatacgcctgcaacccggcgtgatcggcgcccaggccaatgcctggctcgcaccgttcgggcgcaagatcgggccggacccagcgtctatcaatgcttgcaagatcggcggaatcgtcgccaacaacgccagtggcatgtgctgcggcacggcgcaaaacacttaccacaccctggcgggcatccgcctggtgctggctgatggtagccgcctggacaccgaagatgccgccagcgtgcaagccttccgccagtcacatggcgcactgcttgaaagcctggccctactaggtcgccagacaagggcaaatactgagctggcggcaaagatccgccacaaataccgtctgaaaaacaccaccggtctgtcactcaatgccttggtggatttcgatgacccgctggatatcctcagccacctgctggtcggctccgagggcaccctggggtttatcagtgccgtcacctacgacacggtgatcgatcaccccaataaagcctcggcgctgatcgtcttcccggatgtcgaaacctgctgcaatgccgtcaccgtgctgaaaacccagccagtctcagctgttgaactgcttgaccgacgcagcatgcgctcggtgcaggacaaaccgggtatgcctgctttcgtacagcatctatcggaaaacgcctgcgcactgctgatcgaatcccgcgccgcttcgccctcactgctgcacgaacaactgacgctgatcatggcgtccctggcggcgtttcccgtggagaaacaagtcgacttcaccgaagacccactggaaaacgcacgcctgtgggccatccgcaaagacaccttccccgccgtaggcgccgtacgcaaaaccggcaccaccgtgatcatcgaagacgtgaccttcccggtagaacaactggcgattggcgtgaaccgcttgatcgcactgttcgacaaacaccactacgacgaagccatccttttcggacatgccctggaaggcaatctgcactttgtgttcacccaaggcttcaacagcagcgaagaagtcgcacgctatcaagcgttcatggacgacgttgcgcaactggtggccgtggagttcggtggctcgctgaaggctgaacacggcaccggccgcaatatggcccctttcgtcgaactggaatggggcagcgacgcttatcaactgatgtggcagctcaagcgcctgctcgaccccaacggcatcctcaacccggacgtggtgctcagcgaagacccgcagatccaccttaaacacctcaagccgttgcccgccgccgatgagcttgtggataagtgcatcgagtgcgggttctgcgaaccggtgtgcccttcaaaaggcctgaccctgagcccgcgccagcgcatcgtgatctggcgcgatatccaggccaaaaaacgcgcaggcgtggacaccaccgaactggaagcggcctaccactaccagggcatcgacacctgcgccgcaactggcttatgcgcgcaacgttgccctgtaggcatcaataccggcgacctggtgaaaaaactgcgcagccgcgaggccgaccgtacgaaaaccgccgactggctcgccagccatttcgccaccgcgctgcaaggtgcgcgctttaccctgcacgtcgccaatggcgcacgcatgctgctgggcgccccacggctggccaggctctcgagcacgctgaccaagctgtccaaagggcaaataccgcagtggaccaacgccatgccacagcccgaaaaagccatccgcttcagccccgctgtgacggacgcgcgcccgcgcgtggtttacctagccgcctgcgtctcccgcgccatgggcccggcagccggtgataaagagcaaatgtcgctgtacgacaaaacccgccaactgctggaaaaagccggctaccaggtagtcttccccgacaaccaggacagcctctgctgcggccagcccttcgcctccaaaggctacgccgagcaggccgaacacaagcgccaggaactgatcggcgccctgctccacgccagccgcggcggcctcgacccgatctactgcgacaccagcccctgcaccctacgcctggtgcaagagttgggagaaacgcgcctggacctctacgaccccgtgcgctttatccgcacccacctgatggaccgcctcgacttcacgccccaggaagcgcccatcgccgtgcacgtcacctgcagcacccaacacctgggcgagagccaggcactgatcgaactcgcacgacgctgcgccaaaaccgtggtgatccccgaaggcattcattgctgcggctttgccggcgacaaaggcttcaccaccccggaactcaatgcccactccctgcgctcactcaaggacgccgtgcaatattgcagcgaaggcatctccaccagccgcacctgcgagatcggcctgagccagcatggcggcatcgactaccacggcctggtctacctggtagaccgcgtcacccgcgcccgcgcccactgacccggcaaaaaaaacgaaccctcgcgcgccggcgcagtcatctgcataggcctcgacaaacgaggcccatcagtgatgtcgctggcagcggttgcacgccagcagcgtcgagcccttttgcgcaaggagacaccctatgaagcgttccgctcttgctggcttgttcatgaccgctgcgatgctcgcctcccccgctttcgccgccagtgacaaagacctgtgccagatcaacctggacaaaatcaacaacggcaaagccctgctcgccaccgacaccagcggtaaaagtggcgaaatagacaccgccgtctcccaagcgaaggccgcccacgccgcaggtgatgagaagaagtgcatcgaaatcacctccaaggccctgcaagacctgcagaacagcgagagaggcggccagtaagcgagagggccaaccttcgggttggccttcgccaagcttttggcgtacactgcacaggcttgtcactcactaagaaacaacgagttacaagcacggggccgtttaggattcgacgccggtcgcgaaactttaggtgcatgccgagttggtaacagaactcgtaaatccactgttgcaacttcttatagttgccaatgacgaaaactacggccaggaattcgctctcgctgcgtaagcagccttagccctgagcttctggtaccttcgggtccagcaatcaccaggggatgtctgtaaacccaaagtgattgtcatatagaacagaatcgccgtgcagtacgttgtggacgaagcggctaaaacttacacaactcgcccaaagcaccctgcccttcgggtcgctgagggttaacttaatagaaacggctacgcatgtagtaccgacagcggagtactggcggacgggggttcaaatccccccggctccaccaattgaacgaaaaaagacgtccttggacgtctttttttgtgtctggaatccagtaaatacgcggttaccagcgctattgcggtcttctgaaatttttgagttccaaccgtttgggtattccagacggtgctcccgcccatccgatgccaaccttggaataccgaaccggtgtcagaggagaatatcatgctgaccaaaacctccgcctctgatcgacagctcaagggagtcaaacccgcgtccaaggattacgtcctcaccgacggtgacggtttgcagctccgcgtacacagcaacggcccgttgctgtggaatttcaattaccgcgaatcggtgaccaagaagcgcatcaacatcggcttcgggacctaccccgaactgtcactggcgaacgcacgaaagaaggcagtcgaagcgcgcgagctgctcgcgcaaggcatcgatccgaaggtgcagcgcaatacgctgaatgaagccaagcgcgcagaaacggaacataccttcgagaacgtggccaccgcctagttcgagctcaaaaaagactcggtcactcaggcctacgccgaagacatttggcggtcgctcacactgacagagcctagctgggtgccaaaacaaaccttgcaagatcttttcagcgattcgcaagcgagcggtgcagccaccaatcaggtagcataaggctatcaggaggtgtagggttcttggagagatgtcagctcgaacaggagtctcctgagttagcgtgccggtgtactccagatctgtaggaaatagttagaacatcagcgcacctggtttttttttggaagggatatctagaatgccgtatttgttagcagcagcgtgagatatacccatgcgccgggaaattaagaaatgatcctagtgaatctattggtaatcaaatgcacatacctctcagaaaagctttaagcgtcttaggtaaatcttctccattctcagtaagtactgtgaacgaacgaagcaaagatgacttagatcagtataaagaccgtttatatgttgagcagcaaatagaaaaagaattccgagaaagggcaagcaaactcaatagaggtgagattatatttctttgtggcagcagcggagatggaaagtccgaaatcctgactcgcgcgtttaacacttttaaagatagatgtgttttccatctagacgcaacacatagcttttccgcgcatgaaacagccatcgaagcgcttgatagattatttgatcaatttgtgagcgcagcacgaccgctgatcctagggataaatattggtatgcttgccaattatgccaaggagggagaagagcgtcactccctgataaaagacaaaattacatcttttcttcgtgaaggcctggatcagataggtggctttcacttcttagattttgaaagtttttcaaaatttaaatttaacgacgacggggagttttctgaattcaccgaaaagctgcttcataatctctctgaacaatcaccagaaaatccattttacttaagtgctaggcagtcagaatctgatgtctcagaaagtaaattagttgcgaacttttacttactagggcttccaggtgtaagaaaagttatcattacacagctttttaaagcgcggctcttaaaagatcagttcatcactacacgcgcgatactggatttactacaccacctgctcacctctgatgcctacctgttcgataacctgtatatggctggagcaaacgagttaatagaacgaacggcagagtttgatcctgcattgctgagaactaaaaaactcgatgatttcattctacgttacgagttgggcctgcctgaccctgaacttgaagtgtttgtcgctaagctttccaatctgaacatctattttaaccgagcgactcctaaaccaggtgacgctgtctctctgattagactattcagcctgcttcgcgatgagaacatagcgaataattaccataggcagtttttggcggagttcgccgatacaaccctgctggaatactcaaagatctggaatctccattccaattatgatggggccgcacccgacaaaattacaataagaaaatactatacgggcatgtttactgcgggaatattgcgatatgcgaacagaaatgctagcgagatgcttgggtctaacaacgagatatttcttggttattatggctcatctaaacttgcggcaaaagtagatattagatttgacttcgataagctttcaacgctgagccgtagaagaaaaagcattcatttttatgcaacgctcaaagtatttgatacatcattgagcgaatttgccgtgaccatgagtttgtttgagttgctaactaagctgaacctaggttatagacccaacaagtatgacaaaaatgccgttgttttgcttgacgaaattgttgaaaaaataaagatcatagcaaaaaaacaagggcgattaaagatttactcagcaggtaatagctacgccacagagatggacgatggaatgatcatatttagcaggggagcataatgtatccgatcccagaaagtttgaaaccatcagatgtgaacaagcttgatagctattttccgttgagaaacaaaggcaatgagtttgattggtctaagattacagggctcgtccttgcctacatcttaaaaaagcaaataaagtcatacagcatcgatgagttccgggctgaatgcaaagtgagatttgataatattcttgaagactctagttactgggccgtgattgaggatatgtatttctctactgatggagtgctcaaagtttccccagtatttttgctattcaaagcccagttcagggggaaaggaaaaattgaactcggggctccaaactggcgaatgggtgctttgtttgcgggactgataggtgaacatgaggcaggcgatggtctccatgaggatttaaattttcttgagcatgagctagtcaagatctttgtacaaaaacttgacttgcttgagaaggataccttctctgtggagatttcatatctcccatatctagcgtccgcgtttagagaggatattgatttcctgtgctccaagcctaacttcttgatggagcatctcgaagatactcttcggctatattcattttcttattgctcacagttagcgctgaatatgcgagcatggcgtgaaggtcagccagaaagtcgaaaaatctattttttactcgacaatgaaaaagcaagttcggaacgcgctatggtgcaaaattatggctataaaatgttctctaaagcgtcggaatacctttttccaatgctgtcgacattagaggttttgcagatcgatggccccaagaggcccctgtggaaggtctattcggagtgctgtgaacatcccaacagttctcaaatattagaccaattgaattcctacgtaagtgcctttagggctcttaggatgttaccgccagctcaactgtctacgacaattgaagatgttttccaacatcttgaagcagttgcgatggatcagtttcgggttctccagagccatcgttctggggttaataagaaatacatgcttgaacttgaaggtcagctcggcgctgactttattgtgaataggggccgggcgggcaaggtactcgtacttaatcaagaccaactagttttgttgactaatctttctattggaagccaagaaaaactgcgtcttcatgagttagtggggcagttcgagcgacgcggcttctatcttgacagccagtcacagcaagtactcgtgtcattctacgaacgcatgggtaatatcgagcgcatgagtgatagtggagacgccgtatatgtccgtaaaaccatttgaaaagtttttagttgagtgccttttacgttatattggtaacaacgtgcaagcgggcgcaagatatcagtttaagtctcccgacgatgagaactccagtaggctacatagcgccttcactgattattattgcgtggcgcccttagattttaacggccagaaactgttctatgttgaggtgcagggcgtcttattgattcccgtgatgcacggagcagatgtcgatggattcacagaaaactacatatcgcacttaagggataaagttgccagtcaaagcgggatcttcaaaaatactgcgctcttctatattcataacagcatgttggatacacttatcaacagcgctatggatgtcgctggaaagggagcagtttggagtccttatgtttttcagggcgaattgcaagcgctcatatctcacgcgtcacctcatgcctcgctgtctaactttctgctccaggatcagttagattctatacttgatgaaggcgctacagtatttggttttacctctatatacaaatcgctttcagatggggttatcgaatttaaagaactgggcttgtttaatgaccctattgtcttgggtatgacgggacagccagctcagataaaacgcagactcgatgaaaatagggccttaaggcgtgaaatagagttcagtgtcttgcactacggcgatcaattggatagcgcgctacctaagtttagccagaagtttattaaagacaatttcgaaggtgctactaattggcgcgatgtcgacttcggcgtatacgaagcagaattagactcaaacaaagcgcctaagctcgtattagataagataaatatcaaggattgtacctatttcgaaagagctaaaagcggtactaaagccggacagagagatgttagccttctgctaatacgtcaaagcacatccgccggggcagttatccagctggatttttcaggcacagatttaaaagagtctgaaattaaaataactcaatcttcatccgagctatctctagacacagaagtttctaaatcgggcggtaaaagcagggccaggttagttgttatacctacggataatgtagcatacttcagtatcgaaattagacgctctaatcgtaccgaagaatatcgattcagatgcttgatggttgagggtgggcttttcgattttagtggttttaaaaattacttcaaggttgagccatccaagaaactgctgactctgcaactggatgagaacaaggttaccgtcaatagtgcgctaaaccacgtctggtcgctaaagggagcgcaagatatcgtggactgttcttcatatggaatagtcgattttgatgtcttcgctaaccaaacggacgtaattcagttctggctatccaagtcaggaagtgagattttattaaatattgaaggtgctactgtagataatggtgtaacaacaccgcttctcttcgatcgtgaacgttatacaaggctctttaaagatgacgggaacggtgagtacaattcagctaagcgtagaataattgttaacaattcggaacatggtgtgtcaggattacgcggtcagctgctggattttgaggatcattttgtctcagagcgcgtattgcataagtcacccgaatcaataatcgtattaaatgagctggttggaaattttgatgaactccataaggcttatgctgacctcttcggatactatgatgatcacaaaaccttaccaagtctatgtgcgtggggggatgaataccggaagctggtgcaggttttactgaactcatatgagacggcgcttgcggaaataaaactaaacaaagtattgaccgcatcagaccgttctcttttgcatataggttgccatacaagcagcgagggttgtgaaaggctttcttcgatccatccactgattctttcgtatcacttgagcctcgtaaacgagataatccttgagcgtgatgcagctggaacgttatctttttatgatttgccagaagtcactttagagcggctttctgcttccggacttctgccctacacgtatcatagcgaatcggattacgcgaaccttgttcctgttaaagacaacccattctggatagatattgtcccccagcggaaaagcagtaacagtttcgttagaagactggtgaaagataaaatatcagagttcacccaagcttatgcacggctatttactattggtaataatagtcgtttaattgtcaacgcaattaaccaggctcaagctgaggagctattcttaggtatagtggatttcttcaacttcaactcactagggtctagctgctcactacatgtaaacttttatgatcgagagttaagcaataactacttcgatctattttccgaggcaggttcctatgataaagcccatcagctgctagggcttaaacctcaatcggcaaagtctgaggcggatgcactcatagaccttgtgcgtagtcgggtaacctacagtaaatttgaaacgtctgcgacgcctggttacatggagtatgctcatctagcatttttcaataacgatgttcctgtggataagcaggaagttaatattgatacacagttaagtggtgtcttatgcaatggccttatttgtggggaggcagccgaaactaatggccatagctactttaccgcgtttggacttcgtgacgtagataccagcggcatacaaagcttacgcatcgccagattattaggcgtattatggaaaccttctaggcatgcaaatgctcagtatttaggaaatggtattgggcttgctgtaagcgctgacttcaaggatctacttacgtgttcgtatgatagcgcgctttggacaactatcattgatccaaaagtgactctggatttctttgcaaaccaaaaagatgtggtcttaattcattactctgaccaatatactagcagcgctggttatgatgcgatcactgtaacaaaacagatagagttgtttcaacgacttatcaagactgattcgagtgtcaatagcgacaggttgctttccgagttcaatgcatttaacggagagtggctgttaaaaatgatgacggcttctccaaaagaccgaaaagaaaaacacggtattattggtgcttacaagttcgttagcgccatgctgaggaagtcggaaatatgctgggtcccgttatcggttgctgaaatgattcgcgtctccggcaatgtaggcctcaagatgagcgaaagcgaattttctcgacgcctaaatggctataaaaaaggcgcaatctctgacgatgttcttttcgtaggtttccatgcctctggtatgtatcttctacccttagaggtcaaaacgggtgcgagacccgattttgagtatgcagcgcagcaggctgctgagctgaaaaggtacttagtggaggaggtcctggggcccgatactttggctggtaaactatatcgatcactcttcgcaagacaaatatttattcagcttgagaagtttaacttgtatcaggtttgtacaagccaaaagacagatgacctgctagctaaccgacatgaatggctatccggcgattacttgattaaggatctaatagactatccagacggtttcacaatggctcatgtagatagcgattgttgctttggcccatcttacaagatgcgcgagccgaacatactccaaattgaactgccctactcattgctgggtggtctgatcgctgctgaatcttcagacgagatggataagctggtattatcttgtaaagttccttcagagtacgtcctatctggcgataattcagttgatgcggcagatcatgctgttcacatgtcggctgtcactgttgaagatgatccttcgattgtagcgcctgagatgcagcagatccagccgccagtccagtcgaccgaaagcacaccgaaatcactcaccgtactgttcggccatgatgctgtacagggaagaccgctcatttgggaacctactaacaccagcaagttcatgaacactaatactggcatcatcggtacgatgggtacaggcaagacacagtttaataagtcgttgatcacgcagctaattagaggcgctccgagcaatgtagatggggcaccaattgggcttttgatttttgactataagtctgattatgtagaccaggaatttgtaactgcgaattcggtaaagtccctaaagttataccgacttccattcaatcctcttagtcttcatggctctatgccaatgttaccagtccataccgccaatgcattttctgaaacgttggctcaggcttttggtttgggtcagaagcaacaactcagattgcgaaaaatcattctggaagcctatgagaacgctggaatcataacaactgattcctcaacgtggacaaaggcgtgcccaaccgtttcgatggtatgggatcgattcctagcgcaggaaaaggttgaagaggactctctgtatgcagctctagatagcttggcaacatatgaaattttcgaaagtgaccctcagaaggtttcttcactttatgacacgctgaacggtgtcattgtgatcgaattagcaggctattctccacagatccaaaatctagttgtcgccctcactctggatcttttctatgcgcagatgcagaaaaatggaaaacctactattcaaggggattaccgtcaaataacaaaaatgatcttggtcgatgaggctgataactttatgaaggaagactttcaaagtctccgtaaagttctcaaagagggccgagagtacggcgtgggtgtaatactatctacgcaagatatcacgcacttcaagacaggtgagaataattatgcatcatatattctgacctgggtgattcatcgtgtagctgagattagaaacgcggatgtgaaagcacttttcaataaagatgacaaaggtgatcaagagcgactgatggaggaaattcgaaagctcgataaacactatagcctatacgtagatggtgataaaaaagtcgtcaagatgcgtgatcatgcattttgggagctagagttgggctaaaattcggcggtcgaaaaaactacaccattgagctttattagctctatggtgtagttattcattatattgagttcacaaagcttttaagactccgatggtttcgtaatgcggagattccatcgtgaacatgcgcggcccaagctttcgccgcttgtttaggatcgaaagatttatatttggatttcaacagcatttctgtgagcagtgctgtatcacctagccaagtagctttatccagtatgagagtgccgtctatttttttgtcatctgcgacatagtaaaaaccagattcaatcgacctaaaaaaagctattctggcagcaatattaggtgtaatgcccgtatatgcttttagctttttcagctgttcctcggtctccgaagataactgcatacgattaggcaacatagtcatccaccttattattgttggcccagaaatatccttccaacagaaccgaagatctacttttctcatcgaactcaatttgataagagcgagatatcgagtggcccaattcttttaggaagtattccttatggacctctgtgtccgttgacaaaataatcacctgatggcttgcatttgggaagtagtttgcaataagcgtatctctgtgatgggagtccagccgccccagcggagtatcaatgatgacggggagctgtcttcctgatgtttttgccagcgagtcaagtattgaaagcgcgtatatctgcttttctccagctgacagcaaattgcgatcaattatattgccatcgctatcttggagttgaacgtcaaaggttgacgagttgattttcgcatgaatgcgaaggtctttcttacgagccagacgctggtaagccaattcaaaattactttctaatttcttgacgcgtgctctcgtcaaggactcagcgtacgcttcaagcattgataaggttcgctcggcattgatcacagcagcgttggcatcatgctggctacgtctattatcatgcatcttctgaagctttcggctgcaatccagctgatcagacagtgcctgcttggcttgggcaagcatgcttttatattcgtcagcggattcttgccgtttcttgtcaaggtctctgattttttgaaaaacgtttagaagctgctcatcatcgggggctcgatcaatatttgcggctgcttgctctagtaattgctctgtcgaagataagcgtttcctacagtcaatgaaacgagccagggattgggatgcttcaacagtaccagtgtgtgtgataacaccaagttcgcgctcagaaatatcgaaatgaaccgatccagaaggcttagctccgaggtagtcaccaaggtttttctctaaaagctcgacgatttcctttttgttcctttggctatggaacgattcggatttttgcaaatgcttaaagaagacatttgcttgattttcgaatgtattggcctgcttaacttgagattcatgatttagctctgcaatcagctttttgatcgcattcggagcgagcgcgtacggaagttgaccttcaagttcggatcttattgagcgctcaagaaaattcttatccttaatcagcccgtcaactttcgcttgctcttccgctttagacgcagcgaaagcgccgccttgagcggttagtagcccttcctgtttccttatttccgcctcgacgagattcatagatatcttagcaagatccgctgcatatctgtaattctccgcactgaagcctaatttttcgcttttttcttctaggtcagttagttgacttcggtagctttcttctgtttctcttgaagcttggcgtttcaagaaaataacaagatcgttccggagtttttcaatcaggtctaagcctaacagccgtctaaccgctgattgcaatgttttaccggtgctgtcctctgccagctcggaaattttttcaccgtcgaagaaaaataaatctgctatcccgcttggaattaactcgttaagaaaaccttgacactgatcgtaatttaactcagtcagtgcagattcgtcctgggataaagttaatttatctttctctccggctacccatgaacgcgtaacggtaaattccgactcaactccatctttgttataagtgaacgtaagagtgattgacgcttcacgctgcccctgattgctgttccagtcattgtgtattagcgattcaagtttgttgacgtattcttgcgcgctatgtacttcgctaaaagccagtcggccatacagcgcaagcctaacagctgtcaaaatagaagttttccccgaaccattcaatcctccaaacagtactatagggcgattgtcgaatttcctgggggataattcaatttcatgggtgcctttgaataccctgaaatccttcatgatcagtttcttaattatcatcgttgatctccccagttacaccctcgatagcgtgcatctgtttaattaccgaactcagctcagcatcaatattctcgatatcaagcttgtgaagatctttctcatgctttttctgaagctcgccgtggctttcttggatttcttccaatgagccccaatctttggaaagaatattttcaattttgtcgaatatcccatgtcggcggctcaagccttccatagatacttccagctcaataagtttcataaccatttcagctgatacgctgtactcactcgacacttgtgttaatagttgcgcatcgaattgatcaaattgggactgatcatcaataacccacggaaggtctttgccgaatacatctttgtaaattcttggaagctcatctgcccaatcgggttcattagggtccctgagccaatgctgccgaattgcgtgcagttcagcttcagtgattagctcaatttttttgcccgattcatttaaatttctttctaagacgagaagctcttgaagccagatttttctgtatttcaaccagtacgggccaggagtgtgtttacgtactgttgatatatcctcaccttcttttgcattttggtatgtaacccgcccgtttcggcgtttaaagttacggtagatgcctttctgatctggctcagtcgttttagcgagcacgtctctgaaagaaaggagcggtagcatccaatcttcgccgttctgaatcagattctccatcgccctgtcttttgttacaactgtacatgtccagcagccgaatctggagttaccacatgaaggagtgctctcgtcgattacaagcgggcactcgccttggcttgaggactgcatatataaggaccacagtggacggttagtacctccccaaggcgtctcccactcttcaatatcatcgggcgtatatctgaatgcccctctcaataaggcccaaacttcgtcggtgttccaagtgtcgataggtgtgtaaatgaatgcgttgggtaatgttgtatgacgagctagccttgacccatcgattctatgtttagcaatcacctgggcacgagatgagctttcgtcactgcgagcccccagcaggatgacgacttcgtcatgcttactaattttgtctttaatgaactcgctgaccggatcgatcttcatccgttctgtgcaccatctaaaatttctgctcggcgcaggatagcctttgccgagtaagttcacccaaaatgtttcactgattttcggagttactacgtgttgggatactggcaatccatcgcgcactcccgagctctcaatcagccgcatgctgtttttgattagatctacgactactggagtttctacgagagtgtcggaagttacaatgaatacttctttagttctcaactctggcggtaaccccaacagagctaggtaaaccaaagtggtgacagcagaggagtctttcccgccgctgtagcctatgatccacgggcgtgcatcatggcaatagattcgctgtatttcagatatgcattccgccagtggttttccagcaaaaagctcattatttatgaaatcttcataatcggctaagtcatgtgcgtgagatagcattttacttacttcctgataactgctgctcaaggattttttcctcttcggatagaggtaaatccatggctatttttagtgaattacaagttagcctaatcgcagcagtagtcttgcttaactttccgtgtgacatggttctacgaagccattctggatttgttttcctccagtccacgttgcgaagtttcgctaactcagatacccaggtgttaggtttttcttcgattaagcttctacctagtagccctagagcatgcagtccaactgcatgcgcatgtacgtattcttgtcgaaggtgtgcaggagatacgcttttgctcatcgccatttgccagtcaggcatgtactcataaagagactcccaatatttgattgcgagggaggcttcttctggcgtgaatccttctttcggtccctttgctaacagcgaacgtgtcgcttgcttgatgctgctaagggtaaataatttactcgaaagcgccgacacgctagagcgctccatctcggtcaatccgatgaaaggaactgtgttccgtgctaattcccgtgcaagctcagaggaaggatcgcgatggtcataaagcgctgctagtgacgggctaggcttaatggcgtgcttgttcaagtctgcaaacatttgctggcttcttttcagtccttcatcaacgaagaacaatactggaatattgtcttgacccaattcgggtcgttcttctaacgcctgttcaatcgctttgcgtctgtgctgcccatcattgatgagaatctgtgcgtccattggcactctgagagtgcctaaattatgcgatgcaggatattcttcaaaatttatgtcgactgctattgatgctgtcaatgcggaaaatacatagtcatccggattgtccagcaagtatttcaccatttccggtatacgcgtcttatttaatgttctctgagcacgtagctccggggggacttcagtttcatcgaaactgaatatctttgggataattctcatagggcaggttgcgatgtaaaacggcctaccagcttgcattcctctaacggcggggaaggagtagcagtaatctacgtctagagctttcatatgagtccgagccagccgtgagggatgccccattttaccctgtgctgcgtcaaaatttcacgcagaatttgacgcaacgtcatcgcgattcacgtttgatgcatggccgagcaacccttgcatgtcagagacatacggagcctctcaggtctctctagactctatacaaaagcccgagaaacccaatcggcgcccttcggaagctgaaattctgtagggttcccgaccatcagcggaaaggaactctgtgatgacagagcattacgaactctcggatgaggcccggggtgtagtcgctggtctcttcatcgaaactcatgaccgagggcggccgcgcctgagcgatcgtctgatgctcgatgacgtactctgggtactctgctcgggtgcagcgtggcgagatttgccgcagcgcttcggcccatggtcaacggcgtatcaaggttcccgggctggcaaaatcagggaacattcgatcagacggccaaacgcttgcacctgagattgaatgaggaaggcttgatcgatctgcaaaccaggatgatcgactcaaccaccgtacgcgcaacccgagagctcggaaaaaagggggcctgatgatcctgccgatcacgctctaggccgcagtcgcggtggcctgacaaccaaaatacacatgctctgcgatgccaacgggacaccgctgcactccccctttctggcggtcaagcgagtgacataagctatgccaagccattgctggacgacgccagcattccatcaagccaacttggcagcccgcgtaaacgctgcaaatggttgcttactgacaagggcacgccgctaccgcgagcaatatcgaatgcagccgtcatccctacctgtgagtggggacatgtacacgcggggcaacaatcgatagcgcgacgatttgcttgatacattcgattcgaattcctttccgatgaccgagcccaaaaaagcatcgcccatggaaatccaggacacgcagcgttccaactggtattccaagcaagttgaccaaataattatttacaagcagaaacagttagataccgactggtctcagattaccccggctcaacgaaaagagacatccatggacgtcttatttgtacctggccttccagcaaccacaatgctagtgtcaccccatgactggctattgcctgacctcgacaaccaccaccacgaccgcatcaagcggagcgtgcgaggtgtcgtgagccaataaccaacgaacttcaaaggcccgccagcgatggacagggccttttttatgcccttgtgtcgctggttcacacgcaaggagatgcacccatgtacgccctgttgatactggatatccaagtcggactcatccacggtccggacaaaccctggcgctgcgacgatctgttggagacgctgaatgccctgatggacaaggctcgcagcgcaggcgcaccgatttttctcgcgcgtcacatcggccctgtcggctcgccaatcgaaccaggcagcccgctcacgctggttgtagaggaactgaagttgctgggcggagaagtggtgttcgaaaagcgtcggcctaacgcttttgcaatgactgacctggcggacaatctgcgctccagcggcgccaccggtgtggtaatcaccgggatgaaaacgcaatactgcatcgacagcacctgccgtgccgcgcgtgatcttggcttcgatgcggtacttatcgccgacggtcatacctgttctgatacgcctttgatgaaagccgaggccatcgtggctcatcacaatgccacgctcaatgggccgttctgccagttggttcaggctgaggactggagcttttagcagaggtttccggaggaaagaaagtcgccagagcagtgcttcggaattttcccgcaatatggcgcgctgttggtgaactggccaaactcgcctgtcgcgaataacctgcgactgttgcagcaatcgcagcgccagactcgacgatagccccatctcgtccttggcgctcaggcagcgactgaacaaaaccctctaccagctcagtacagcgcgcaggcaattgttagaacctgcccagcagtcctgagctttttttcgcctggcaaaaacacaccagtaataatcatgaacccaggcttgaaccccgcagagccgagcttcggaattttcccgcaagttgccgcgctgttggtgaactagcgcaagccacctcacaacgctaacttctttgcgtcgctgatgatcagcgtccggctttgacaggccgaaaagtgtaacctttcacaccccgtgataagacggcatgcttacgcattccgccctgttcatggcggctgtgcgtggggcatcttcgggtgcgccgggttcctacacttccggtctgtcaacccgcgtacagcggccacctattctgtttgacagcagggggaggcagctccttaaacagtgtaggagcttcatcgtgaaaaagatcacccccaatcccccctccgccaacctcttcacactctctccagacattccctgcgaaaccctcctgatccaagccagcgaaactctcgcctctctcaacgccatgaccaccgacctggccttcgaactggaaggcgccaaccgccacaagctgttggccgctcagcaactcaccgtgctgggtgagctgttggttgagcgggtgctggtgctcacccaagacaggcaaaccttccagtaaccaaaaggccgaggcgcgttcagcggctcggcctttttctgtcatgcgtctcagacatccaagcgcatcgctgccatcatatcccccgccgcggccctcaaagcattgatgacaaggacgaactcccattgaacaaaaactcctacgccttcgtaataccggtcgccattggcatgctggtgtccatggcgctggtgctggcctgggtattcgttatctggccgtctgtgcacttcaagccgttggccgagaagatctgcctgatcgcgtcgccggtgctggcaattgtgctgatgctctatgtctggcgcgtcaggaaaaccgaatggctgcgtaaaaagcccctggaccgattgaggttttttctcggtacgttcatcgcaagtgccatggccatgatctccctgctagcagtcgtcatccttcttacaagtgcgacgctgcgcacctacacaacccagtacgaatacacaacaggcggcagccgtagttgttcaggcatcctggtgttcgatacggaagtgaacaagcaaatcaagatctgtcatgtgggcggtagcggtgatcagggctgggcgacggtggaaaagcgcagcgggcctttggggattgtggtgacgaacgcaacacctgcgctcaatatttccccattcgttcgctaaaggcaccaacaccggggcggtgcgggccgttctgccaggtggttcgggctgaggactggagcttttaacagagcctgaagacgggggaaggtcaacaggaccgggcttcggaattttcccgcaagatgcagcgctattgatgaactagcgccccccaaccaacaagcctagccttccccctgtcgctgcaaaatcagcgaccgggtttagcagctcggttaatatcaaggcctgcaaagccaccatccgttcgggcgatgctttctgcatccgctggttcgtatcatggcggctgtgcgtggggcactttcgggtgcgccgggttccttgattcctggtctgctaacccgcgtacggtcgccacccttttcgtttagcagcgatgtctggcgactccatcaatcaaggagtttgagccatgaaaaaaatcacccccaatcccccaaccaccctcttcatcctcgccgaaaacatccaccccgaaaccctgctaatccaagccagcgaaaccctcgcctccctcaacgccatgaccaccgacctggctttcgaacttgaaggcgcgcaccgccacaagttgctggccgctcagcaattgatcgttctacgcgagttactcgtagaacgggtcttgaacacccaaccattcactacccagacaccacagccctaaaacacgcgaacgggcgagctgcctcagcgcatctcgcccgctggcatcccctcacacttcccattaccctgacggcctttatcagacaaccggaagtcagatacccgtgttcaagcccttcgccgtcatcgccctcgccgtcatcccttcactcgccaccgctgccgagttggccggggtttggcaaggtactttgggcaagtccgctatcaccgtctgtttcaacggcgccgacggggagcatggcagttattactaccagcgcatccgtaccccgattcaactgacccaggccaacgacaacgccccttgggtggaggaaggcaacaccggtttctgggccctgcaaaaacctcagggcgataccctttctggtgcctggagcaaaacagatggcggcacgccgctgccactggctttacgccgcattagtgcggacggctgcggcagcgatgcctataacgcgcccatggaagccgcgccgctgccgatcaagaccgagaagaagactttccacaaccacacctaccagctcaagacccaaggcccccgcgtcacgctcaagcttgcgggtgacagcccggcggtgcagaagatcaaccagcagctcgccgccctggccgtcaatgacgaagatttaaccgactatttttatgaacggcgtgaatacctgggtcgaaacggttcggtttataccagtgagatcgaggttgagcccgcctattggtcatcgcaatttctcaccgtgcggttctaccgctgggccgcaggccaaggcgccatgggcatcagttggggcctgcactcctggaacctgcaaaccggtgacagtgtggacccatggacctggctcggcggccatcagcaatggcatgacgcctattccggccatttgaagctgccggccgccttcagcccttggctggccaagcaaaccaccaccgacgagggctgcccggcgatcaccgattactccatctttcacctcagcttcaacacccagggcctgcaactctcgacaccggccaatggtgacggttgcgacaacgacttgagctttacctgggagcaattggagccggtgctgaccgaacaaggcaaagcggcagtgcccagcttgaaactgccttgatccgccggagaaaaaccccacggccgttcaccaaaggttaagaatcgcgctcgtatactccctgactacccatgaccggtcgcccgatcggtctcatgcctcggtagccagactccatgacgcgccccgctcccctgctgctcttgcttgctgctctgttgttctttttcgccctcggcaaccatgagctgcaaggctctaccgaggctcgggtgtccgggatcgccatggcgatgcacttggacgatgactgggtggtgccgcgcctgtttcgtgaacccttcctggaaaaaccgcccctgagcctatggctggatgccggggcgattcgtttgtttggcgccagcaccggggcggtgcgcttggcgtcggcgtttgccgggttgttcagtgtgatgctgttgtacgggatgctgcggcggttcgggcggccgcagacgctggcgttcagcgctgcgctgatcctggcgaccatggccagttattggggcaatgtgcggggggtgggtgaggattcgttgctcagcctcggtgtcaccgctgccctgctggggttttaccaggcggtacggcccgatcgtgaaggttcgagtacctgggcctgggcgttgtttaccgccgggatggtcatcgccacgttgagcaagggcgtgttgggcctggcgatgccgggcattgtgatttttgtgtacttgctttgcaccagcctcatggataagcgcctgcggctgggcgattggctcaagccggcgctgttcacgctgttggccttggtgccgttgctgatctggctggggtttctgtttcagcgcggcgggatgcaggcggtgggtgaagtgttatggaccaatagcgtcgggcgcttcagcggttcgttcgtagaagccgggcattacgagccgttttactattacctcgcgaaactgcccgaggcgttcctgccctggaacatcctggtgtacctgggcctgtggcatttccgcaaaagcctggtgcgcaaccgctaccggttgtttttcagtgtgtggctggtggcgcagttcaccctgttgaccctggcttccagcaaacgcaccgtgtacttgatggcggtgacgccagccgccgcagtattggccgccgaatatgcgcgggtgctgctggagtgggccaaagaccataagccgaggctgtaccgctatcaccgacagatcatcggcggggttttcaccctggcgatcgcctgctacctgagcgcagcgttctggtttgcccccaaagccgatgtgcgccattcattcgtacccgtgatcagccagatccagaccctgcaagacgaaggcaggacggtggcgatgtaccaacccaacgagcgcatcgacggcgccagcgtgttctacctgcaggcctacttgccgatcctgaacaccgaagccgaactgcgcgccttcctcaccgccaagcccggcaacgttgcgttgacggaccacaccgaccggctgaaagagccggttacggtgatcaagcaaatggcgatcaaccgccagccttattacttcgtggagcagtaaggccggcgcgcgatatcaatgcttggtgagcttgtccaggtagcccatggcaaacgccgagaccacgaacgtcatgtggatgatcacgtaccacatcaggtgctctggatcgacgttcttggcgtccatgaagatgcgcagcaggtggatggaggaaatcgccacgatggaggccgccactttcatcttcagcgacgaagagtccatggtgcccagccagttgagcttttccttgttttcgtcgatatccagctgcgacacgaagttctcgtagccggagatcatcaccatcaccagcaagccgcccaccagcgccatgtcgatcaacgacagcagcagcaggatcacttcggcttccaacatggtgaagatgttgggaatcacatgaatgatttcctggaagaatttcagcgccaggaccagcaagcctagggacaggcccaggtagatcggcgccagcagccaacgcgaggcgtacatcgtattttcgataaagcgttccattgaatctcacacagcttggctaaaaatggtgccgagtataccagccgccacccggcccctgtcaccgcgagaaaactgacccaagtggcatctgtaagagaatttttctgctagtgtcgagaccattcactcggctcgatgatgtcggacaggaaaactcagatgatggatgtgcgatcccctttggccgctctcggcctgtgcgcggcgttgctgatggccagcggctgctcccccaaagaagagcagaagcaggcgaccctcgaagagaaaaccacgaagttcgaacagtccctggacagcatccaggaccctaaactgcgcgatgccattgcggacctgggcggctcgctgctgttgctggaacgtgcgcgcgtcaagctcgccagcaagcccatcgaagccgaatacggcgaagacagcctggccctgctcaagcattaccctacgccccaagcgctggtggacacctacatcaatggcctgttcgtactgcgcaaaacctcgcactccgactacctgacggatttgcagccggtcttcccgttcaacttcaacgccccggaccagttccccttcccccatggcctggaatggcagtcggtcaccctgagcaacaataaagtcattcccttccagccggaatggtcagaaaccgaccccggcatccagctgagccccagcagctccaacctgaccaaccccgacgacctgacggtgacctacccgtttatcgaaggcatcgagacggaaaacaagagccagccacaacccatcagcctcaagggcgcggtggaggtgatcaccccgggcaaggtgctgacgttcgacctgaccaaacaagacgtgggccataaacgcacagatggcaatatcaccctcaacctgctgacgctggaaaagaactacgccgagatcgaattgaccaacagccagcccctggccgccgaagtcggcgacgcgtcacccaatccgctgctggtgcaggcacgggacagcaccgggcaatttctgacccgctcaggctcgatcaacgagagtgccgcgcaagtggcgttctatgagaaacaactggccgagatgcagaaacaaaccgcgtggtccgatgccttcgataaacagctcacagacgcgcaaaaagccttcgagcgccagcagacaagccattacgccaaggtgtatttcaacgggctgatcgataacctgcaggtgaacgtgctggatttctccaaggccacgctcacccgtaaagacctggacctgccggtgatgcgctttgacaggaacagcctgcaaaagaccgtacagcccctgccaatgccggtcacggtgtatgacgacggcgccgccagttggctcaaagatgcgtcgatgaccgaggagcaactgaaaaacagcgtcaccctcagccaatcgaccgaagacgccagtgccgcaaaaatcgtgtttgaccatccgttcaccttcaatgacgacctggtcggtgccgagcgcaacaacagtgacgcgcctatcacctttttcaccgccgatgacaagggcgagcgcggcgagcccatcgagctgccgaccgaggctttcgagctgaacgcagtaaacggcacactgacttacgaccttaatctgttcccggagaccccggcgtttgtggtgggctcggtaccgttgtttttggccaccatcgagaaggccacgattgacgccgccaagctgcccaagggcctgtcgctgaaggacaacgcgctgatcgtcgaccagaaggacttccccgccgacagctggcgcttctacgccaaggatgccagcggcaattacctcaaggagatcctcggcgtcagccaccgcgccgaggaatacggcacggcgatgtttgacgtgcattacttctacggccagccgaccacgctggaaagttaccagcgcaccgacctcagcaccgtgcagtacggttttgaggtgaagctggacaggcctgagagcaaatagccctgggtggacgcggagcgtccggggcggcgttaccacgcggagcgtgggaacgatcctcagagggccagccgctcctggccgccattgagttggcgcagatgggcctgcaggtgcaggcaccagatctgcggttcgtccatttgctcgtagccgtgcaaggtcaggctatcgacgatggtgcccagcatgcgttctgccacgaagggcccatgaaacgggccctgggatttgacggtggaaggctgttcgcccgacatgccggcggcaaatagcagcgtccacatcccgttatccccggccagagggcgaatggagcattcgatacgggtgaccaggcccaggcactggcgggtaaggcaaaggttgcgcgacatggcggcgaccctcggtagatcggtgttcagccccagcgcacggcgaggctgtttctatcctgcgactcctgtggatatccctgattctgagaatagaagaaaaacacgacaatccaaggttgtagagaccaacgggcgttggtccctgagggtggagtcaattttgtggcacgctaaacgttcccaaaaacaccacggaccagtgtgggagctggcttgcctgcgatgacagactcacagccaacctcccagttgactgatacaccgctatcgcaggcaagccagctcccaccttgaccgagtgatgacagcaatcaggtcggcttggcttctgccaacgcctgctgcgccagctctttctccgcctccttcaaatcctcctcactgatcatctcggcaatcgcccgcaagcgctccaccacccgcgcattcacggtgccttccgggaattgcccctcggcgtccggctcgccggcatcctcgcccaccagcaggctcaaggcctcatcggcctggcgcaccgcatagatatggaactgcccggcacgcacagcctgcaacactttctcgtcgagcatcagcgtggcgacgttggcctgagggatgatcgccccctgctcaccggtcaacccacgggcttcgcagaggcggaagaagccttcgatcttctcgttgaccccgcccaccgcctgcacttcaccaaactggttgatcgagccggtgatcgcaaagcattgcttgagcggcgtcttcgacaaggccgagatcaaggtgcacgcctcgcccagggacgcactgtcgccgtccacatagccgtaggactgctccagggcaatactggcggagatggccaacgggaattcctgggcataacggctgcccaggtaaccggtgaggatcatcacgcccttggagtgaattggctggccgaggttaacttcgcgctcgatgtcgacaatgccgctgccgcccgggtacaccgtggcggaaatccgcgccggcacgccgaatgccgagtcgcccacttccagcaccgtcaggccgttgcacttgcccacggccgcaccggcggtgtcgatgaggatgacgccggcgagcatgtcgtcgagaatccgcgccgacacacggccggtgcgcgtggccttggccttgagggcgcgctcgatatgcccggcatcggtcatctcatcgcccgccaggtggcgaataaagtccgcctcgctgaccaactggaacaaatcaccaatacgcgcagacaagcggccttgatgttcggccaggcgtgcgctgtaagtcgccaggcgcgccaccgcgtccgaggtcagcggcgccatgccttcttccgaagtacgggttttgagcaactgggcgaactgctccaggctctcgtcgaccatggggatgtcttcgtcgaagtccaccaatacgcggaacatctcctggaagtccgggtcggcgtcttgcagggcgtaatacaactggcgcgaaccgatgatgatcaccttgacctgcaagggaatcatctgcgggttgagggtcacggtggccaggcggccgagttcgcccaggggcgattccatcttcagcttgcgcgattgcagggaacgcttgagcgcatcccacacaaagggctcgctgagcattttttcggcttccagaatcaggaagccgccattggcgcggtgcaacgcgccgggacgcagctggcggtaggtggtatagagcgcgccctggtcggtgctgtattcgatacggccgaacaggttgtcgtaggtcgggtgcggttcaaacaccaccggcgcgccaccgttgaccgagtggcccaccaccaggctcgggcagtattgctcctcaagcagcttgcgcgcctgggcgtcggtcttggcgtcgtccaccaattgctcgaccacggttttgagcaagtacacctgcatggcctgcagatagccacagaccccggcgttttctgcatacttttccgacaacggtgccagcaacggctgcagggccagggtgatggtttcttcgttgaactggcgcagctggttgttggactcgcgcttccactgcggcaggctggccagctcttcgttgaggcgttcttccagctcggagatatcggtgtggaagcgctcgcgatcggcttccggcagttgcgaaaactcggcttcatccagcgccttgccgtcgagcatcggcgtgaaggcgatgttggagctgtcgcggtacagcgccacgtctttttccaaggccaggcgttcgatcacgtccagcgctttgtcgtagcgctggttgaacgcccggtcgatggcgcttttacgctgttgataagtcgggtgttcgaacaccgccgggaaggtggcgaccaggttatccaccaaggcgttgatatcggcaataaacgccgcggcggcgccacccggtaattccagggcgcggggctcgcggggctcatcgaaattattcacataaacccagtccgccggggtttgcaggcgcttgccttcggctttcaggtagcgtttgacgaacgaaaagcggccggtgcccggctcgcccatgacaaacacgttgtaaccggggcgtggcatggccacgccgaactgcaaggcttcaaccgcacgttcctggccaagcacaccgcgaaagggctccaaatcattggtggtcgagaagctgaactgttcagcggagaaagggcgagtcagcgcttcgggcgctagacgcaagctggcagcaacaggatcaggcatcgggcttccttacatcaggcggggcagatggggcattctggctcccggttgagcgctctggcaaggcgcgctttcgggaaagcatagacacggcacgcgtcctacaaaaaaatcgcccgccactgaatgtttataaaaaaacacggaaccctgggaacgtgcctaaactccaaactgcgcgggttggactaataactggcccctagggtgctgcgaagcacctgaacccttgtccattggtttgcacacaaagagaacaaagctatgaaacggatccttcttggtactctcttcaccgtcgtctccctcaatgcaatggcagaagcaccaggtggcccgaactgcggttggggcaacatgttgtttgaaggccagcgcggtactccggcccacttcctcgcctccaccaccaacggtacttcgggtaacgccaccttcggcatgacctcgggaaccaacggttgcagcaccaacagcgccctgacctacggcggcaagtcctggattgccatgaatggcatgatgaacgagctgtccgaagacatggccaaaggcaacggcgaagcgctgaccacctacgcggtggtactgggtgttgcgccggaagatcgcgatcacttcgcggccgtgacccacgagcacttccagcagatcttcagcaaggctgacgtgaccgctgacgacgtgcacaacaacaccattgctgtactgaaaagcgatgcccgtctggcgaaatacgcaacccaggcttaagctcgacctgcccgcgcctttcgaggcgcgggtactatttttggacccgcctcccctttgggtctcacttttttgacttaagttgcccctatgctcaaacgctttgcctggttggcactcttcgcctgcgccccgctgtacgcggccccgcaccttgatgatcaacgtttgcagcaactggccaatgatccgttctggctgtcgctggggcactacgaagccggcaaagtcagtggctggcgcagctatgtcagcgacaagaaattcttcctcgctcccgatggcgcacaccatccggatgcggaactcaaggccaccgttgatgcgctgtatgcaccggccagcctgggtgaaaagcacgcccaatgcgtttaccccgcacgtacccgctggctcaaggcgcagttgcaactgaacgacctgcccgccctggaatgcaaagagttcacccagtggttcaaggacgtcgcgccccatagtgcggtgatgatcttcccggcggcctacctcaacagcccgtcgtcgatgttcggccacaccctgctgcgcatcgaccaggccgacgtgcaaagcaacaacaccgcgctgctcagctatgcaattaacttcggtgcctatatcgaaggctccgacaacagcatcctctatgcctggaagggcctgatgggcggttatcccggcctgttcgccctggtgccttaccaggaaaagctctccgaataccgcagcctcgaaaaccgcgatttgtgggaataccgcctgaacctcacggaagtcgaaaccaagcggatggtcgaacatgtgtgggagctcaaacagatccagttcgattacttcttcttcgacgaaaactgctcctatcgcctgctggaactgctgcaagtggcccgccctggcctgcgtttgactgagcaattcccactcaccgcgatccctaccgataccgtcaaagcggtaaaggatgcggggctagtggaaaagatcgactatcggccttcgcgtgaacgtgaactgctcgaacgcgccaagccgctggacagcgatgagcagcagtgggtgttgaaaatcagcgatgaccaaaagcaactgcaggagcctgcattcaaagccctgccccgcgaacgccaggcattgattgtggacgccgcttaccgcctgggccgctaccgcgccaacggtctggagcgcgatgcgacacgctcccagcgcagcttcgaactgctgcgcgcaatcaaccagaacccggcgcccgacctgaagatcaccccgcccggcctgccggaaaacggccacgagtcgcgcacctggcaagccggcatcggcacccgcggcgacaaagccttcggcgaatacggcttgcgcatggcctatcacgacctcaacgacaacgccgaaggcttccccttgggcgcgcagatcgaaatcctgcaaatgaagttgcgccagtacgagggcaatcactggcagctccagcaactggacctggccaccatccgctcgctgacgccacgcaatgcgctgctgcaaccctggtcgtggcaagtcaccggcggcctggaacgcgtgccgggcaaacacgacgacgaaaccctcgtagcccacgtcaacggcggcgccggtggcacctggcaactctccgacgacatgctcggcttcgccctcggcaccgtgcgcgtggaacacaacaacgacttcagcgaagccatctcccccgccgccggtttcaataccggcgtgctgtggaaaaacccgttgggcaacctgagcctggaagccaagggcgatttcttcaccaacggcgaagtgcggcgcagcatcagcctcaaccagcaatgggaactgtcgcgcaacctgggcctgcgcctgagtgcccagcgtgagttcagccacctgtccacgccagtgaatgaagtgatgcttgagctgaagtggtaccactactgactcaagcccggtgaaaatcaaaatgcggggactaccccccctgtaggagcgagcttgctcgcgaaaaactcataggcgccgcgtttactcaggaaacacgcgtcatcgttgacgttnnnnnnnnnnnnnnnnnnnnnnnnnnnnnnnnnnnnnnnnaaacggccagggagtacgccatgtggcggtatgcggtcatgctgtgcgctgtggtggggttgtcgggttgccagtcaacccatcaggaattactggccaaaggttatccaccggccttcgccgacggttttgacgacggttgcagcagcgggcgccaggccgctggggtgattaccggagagtttcgcaagaatgtgccgcgctatctgaaagaccggccatacgccgaaggttgggaagacgggtttcgtcagtgcaaggccatgcgcgagaatcaggaattgcgtgactacgaggaaaaccgcagggacgaccgcgaacacgattggcagcaggaaaaagatcgcgacgctgccaaagcctatcgctcgcgctgatcgacgctgatcgttcccacgctccgcgtgggaatgccgccctggacgctccgcgtccgctcgcgaggtcgtgacgcggagcgtcacaggatgcgttcccacgcggagcgtgggaacgatcagcccgcgaacgtggcccaacttccataggaaggagaacgccatgagccgagcttttgtaaatgaagataacgccgcggcccaggctgatcagccggtggagcgtcaggtcagcgcgcaacctaaccgcctgaccgcgcaagggttggcacagttgcaagccaaggtggcgcaaatgcagcttgagtacagtgccgagtccgccaagggtgagcaggccgataagcagcgccaggcggaccttgagcgggatctgcgttacttcaaccaacgggtgcaaagcgctcaggtagtcgcgccggccacgtccaccgacaaggtacagatcgggagttgggtcacgttcgccaacgagcaggacgaacagcagcgcatccagttggtcggtgaagaccaggccgatgccaacgcaggcttgatcaactggggctcgcccctgggccgtgccttgttgggagcccaggtgggcgacgaggtgctgtggcagcgccccgccggcgatcagttgatcgaagtgctgcgtatcgaacccgaggcctagacgataccctgggccagcatcgcgtcagccactttcacgaagcccgcgatgttcgcgcccttgacgtagttgatgcggccgttttcttcaccgtaatgcacgcaggcatggtggatcgactgcatgatgttgtgcagcttgctgtccacctcccctgcagtccacagcaggcgcatggcgttctgcgacatctccaggccgctcaccgccacaccaccggcattggacgccttgcccggcgcaaacagaatgcccgcgtcgataaagatatccacagcctccaacgtggtcggcatgttcgcgccttcggccacgcagaggcagccgttgcgcagcagggtgcgtgcagcgtcggcgtcgagttcgttctgggtggcgcagggcagcgcgatatcgcaggccagctcccaaggcgtctggcctttgcggaactccaggccgaaacgtgtggccagttcactgatacgcccgcgctgtacgttcttcaactccagcagcgccgaccattgttcttcggtcaaaccgctttcggcgtacagggtgccttcggagtccgacagggaaatcaccttgccgcccaggtccatcactttgcgcgccgcgtattgcgccacgttgccagagccggacaccgccacccgcttgccttcgacgcgctggccttggcgcttgagcatttcctcggcgaaatacacacagccaaaaccagtggcttccgggcggatcaggctgccgccgtaggtcatgcccttgccggtcagcactgaggtgaattggttactcaggcgtttgtactggccgaacaggaagccgatttcccgtgcgcccacaccgatatcaccggccggtacgtccacgtccgcaccgatatggcggtacagctcgctcatgaacgcctggcagaagcgcatcacttcggcgtcgcttttgcccttggggtcgaagtccgagccgcctttgccgccgcccatgggcagcgaggtcagggagttcttgaaggtctgttcgaaggcaaggaatttcagcacgcccaggttgaccgaagggtgaaagcgcaagccgcctttgtagggcccaatggcgctgttcatctggatacggaaaccgcgattgacctgaaccttgccgtgatcatccacccacgatacccggaaggtgatggcgcgctccggctcgcagatgcgctccaggatgcccgaggtcagataacgggggttggcttcaagaaagggccacaggctgcgcaggacttcttctacagcctggtggaattccggttggtccgggtcgcgtttcttgaggcgggcaaggaaggagtcgacggattcggtcatgaaaagtctcggcaaattgattgttgttaaacagagaatgagccggactttatcaattcgtttcgcaccgcgacagggcgaaatgtcgcctttatgaaattaaatggtgcaacaagtataaataactcccattttctgcccttaaatggggatttcactctgagttttgcaccaacaggtaggccgttatcgcaggcaagccagctcacacatttgatcgagtacaccggtcatgtgggagctggcttgcctgcgatagcggtggtgcagttacagatgcatagtcctttattggatgaaaaatcaggctggcttgccgcgctgtccggcgatcagggcctggggcgttaccggtttccagcccagcagggcaatcgccagcgacaacagctgaaaacctgcgaccaacgccacgcagcccggccagccccattgattccagagcatggccgggaccacggcgccagcgctgccgcccaggtaatagccggtcaggtacagccccacggcgccggatttgtcagggcctgccgtggtggcgatatacgcattggcggatgcctgcgccaggaatacgccggtcgagctcagggccagccccagcacgatcagccacagggacggcaacaatgtcagcgccgagccacagatgccgagcgccacagcgccggtcagtaactgcgattgtggtcgcgatttgctcaagcgccccgcaataggaatgaccaccagcgccagcaggaacaccgcatacaaagtgcccaaggcggcggcgcccaggttgaacggggcctggctgagatacaggccggcataggtaaaggttgcgacttgcgagaacagcacgcagaaaccgacgccataggccgccagcaagggtttgcgcagaagccggcgcaccccgtgcgtgcccacggccgcgacgccgggccgtgccaccggattggccggcaacagccacacaatcagcaggccgaccagcagactgatcaccgccaacagttcgaaggcttcgcgccagcccacatattgggtcatgacacccgagacaaagcgcccggcaaacccgccgagcaccgtacccgcgacgtacaaactggtgatctcggtgacggtggccgcacgccagcgatcgccgatgtaggccacgctggtggcgaacaccacggggatcaacatcccttcgacaaaacgccacaccagcagctcggcaaagccgtccacataggcggtcagcagcgtcggcagcgccagcagcaacgcggccacggcaatcacggtgcgttgctcgaaacgtccggtcaggcgcccgacaaacggcgcggtcagcgccacggccagcgtggtcaccgtgatgctccaccctgcctgccgggcgctcacctggaagctttcggcaaacgcaggcaggatgctctgtgtcgcatagagattcagaaacgccgcacagccacacaggaacacggcgaagcgggcgtgatgcatgcgcgggttcatgtgacctctcgtcttatagtcgaggatgtttatagaatacccagcgcagggaacaccaataccgaattcggaccgatcaatacccaggaaacagaatgcttgatctacgcaagttacgttacttcctgacggtcgccgaagagctgcacttcggccgtgcggcccagcgcctgcaccttgcccagccgcccctgacgcggcagatctcggccctggaaaccgagcttggctttcgcctgttcgaccgcaccagccgcacggtcacactgactgcccagggccagcactttttgccctatgcccgcgcggcgctggagcacgccaggcttgcacaagacatcgccgccaagctggctgccggctcgaccggccaactggtcgtaggctatgccagctcgatcgcgttgtcggaactcttcagccaaaccctgcaagccttcgcccagcgttttcccgatgtgcaactgaccctggtagagagcgcttccggcagcctgcacacgcacgtgctggacgggcgcatcgacgtcggcatgagccgcctgctgccggaggccgggcaaaccggcgtcgaggctttgtcgttggggcaagaaccgctggtggcggcgctttgcagcgacaacccgctggcggagcagagcgaagtcaccctcgcccagctcagtgagtacccgttgattctgtttcccagcgattacggttcgggcctcaacggctccatcgagcacctgtatcaacgccgcggcctggcgctgcgcccgggcccagcggggcgccagatcacctcgatcatcgccctggtggcggcaggccaaggtgtctcgctcgtgccccagtgcacccgcaccctggccagggaaggcgtggtctaccgccccttggcagaccccgaagcctgggtacacctgctgatactcacacgctcgcagtcacgctcactgttggtcgaggcgtttatgggggtggtcgaagaattgctgcgcagccgcccggccctggcgcccacgacgcttccggcataacgggggcaaaaaaatacccctgcgtgaggggtattttttcaacaggctgctgcggctattgcagcatcaggccagctttttgtgacgcacacggtgcggctgggcagcggcctcacccaagcgcttcttacggtcggcttcgtactcggtgtagttgccttcgaagaacaccgcttgggagtcatcttcgtacgccaggatgtgggtcgcgacgcggtcaaggaaccaccgatcgtgagagatcacaatggcggcgcccgggaagtccagcagggcttcttccagggaacgcagggtttcaacgtcgaggtcgttggacggttcgtcgagcagcaggacgttgccgccctctttcagggtcagggccaggtgcaagcgaccacgctcaccaccggacaggtccttgacgaacttctgctggtcgccgcccttgaaattgaaacgaccgacgtaggtgcgcgacgggatttcatagttgccgatgcggatctggtcggaaccgtcggagatctgctggaacaccgtcttgctgccgtcaaggtcgtcgcggctctggtccacacaggccaactgcacggtgtcgccgatctcgatgctgcccgagtccggggtttccttgcccatcagcatgcggaacagcgtggatttacccgcaccgttaccaccgataacgccgacgatcgcgccttttggcatggcgaacgacaggttgtcgatcagcacacggtcgccatagcctttggtcacgttcttgaactcgatgaccttgtcacccaggcgcgggccggccgggatgtagatctcgttggtttcgctgcgcttctggaattcctgcgactgcatttcttcaaagcgttgcagacgagccttggatttggactggcgggccttggcgcctttgcgcacccactccagttcttccttcatggctttttcgtgggccgattgctgcttggattcggcggccagacggtcggacttggcttccagccaaccggagtagttgccctcgtaagggataccggcgccgcggtcgagctccaggatccagccggcgacgttgtccaggaaataacggtcgtgcgtgatcgcaaccacggtgcccgggaaatcgtggaggaaatgctccagccaggcgacggaatcggcgtccaggtggttggtcggttcgtcgagcagcagcatgtcaggggccgacagcagcaggcggcacagggccacacggcgcttctcaccaccggacaggtgctcgaccttggcgtcccaggctggcaggcgcagcgcatcggcggcgacttccagttggcgctccaggttgtgaccatcgcccgcctgcaggatcgcttcgagcttggcctgttcagcggccagtttgtcgaagtcggcatccggttcggcgtaggcggcgtacacctcatcgaggcgggcctgggcgtccttgatcacgctgacggcttcttcgaccacttcacgcacggtcttggtcgggtccaggatcggctcttgcggcaggtaaccgatgttcagctccggcatcgggcgggcttcgccttcgaactcggtgtcgacgcccgccatgattttcagcagggtagacttacccgaaccgttgaggccgagcacgccgatcttggcgccagggaagaaggacagcgaaatgtttttcaggatttcccgcttcggcggaacaacttttcccagccgatgcatggtgaagacgtattgagccatggtgaacctagcgtcagtgactgatgaattaagcggacgaagcccgtgccaggccatgcgccgcgcgggcctttgactatcatcaatgccagcgagcaaaaaaagcctgaatgtctggggctggaacgcccccgcgtaaccggcaaagctacctgaatgcgctggggcagtccagccaggcaggactggcactttgccacaactcaaggcatgctagccgcccttcgggcgtccggcttatagtgcacgtcgcgcgccagtccagccaaaccgcaggatcacagtttgtccaacgtcacgccgcccacgcccttgcgcgccgctcatattgcgccgggagcgcccctgcacggcaccttgaaaggcgcgttggcgacgcttgtcctgctgttgctcgccttgttgttctggcaactgcttgaccaattgcagcaaaaccagaaaaaccaacagcaatacaccatcgactacagcgccgacctggctgagcagatcagccagaacatggccctgagcgcgcagatcgccctgaacctgctgcccatcctcgaaccaccgcgcacttccgaacagcaacaggccttgatgcgctccctgcagcgctcgttgccagacctgcgcagcttcgccctgctcgcccccagcggcgcactgatcagcgacaccgccgaaggcagccaagacagtgccctgctcgaagacctggtcaagcgcagtcacgcccagtcctactacctgagcaacgacaatgacggcacggtcatctatctgttgctgcaccaacccagcggtggctccaaggtgtactgggccttgcgcctggcgcccaattatctggccaacctcacgcgccaggatgtccagggccagcgcccgatgtgggcgatcgagaacagcctgaaccatcgtgtggtcagccgtgacagcggaatgccggcgcagtggtccggcgccctgacgccggaagaattgaaccgcagcgtgctggtcacgccgttgagcaaaagcgactggcaactgcgcggcatgtttgaccgcagtgcggtgctggagcaactgctgccggcctttatcggcaagtgcctgctcggcctggcgttttcgctgatcccggtgatcgtgctgctcaacatgcgccgccgccaacgccaggtgaatgaaggccggcggcgctatcaggacatcttcgaaggcaccggcgtggccttgtgcgtgctggacctgtcggggctcaaggcgttttgcgacaaaacccaggtgcaaagccgcgagcagttgcacgcctggttgcaggccaaccccacgcagcgcaagcaactgctcaaggagttgcgcgtcaccgaggtcaaccagatggccgtgcgcctgctgaacgtcgcgtcctgcgagcaggcctgggaacgcctgatcgacgattgcccgcgcaatgccacgtccatcggctatcaggtgctggaagccgtactgacccggcaaaagcagctggaactggaaatccagctcaacgacgtggccggcaacgaacagtacctgtggctggtgatgcgtttgccggagcagcaagatgacgtcaaggcggtgatcctcagcatcagcgacatcaccagccgcaagctgatcgagctgtcgctggtggagcgtgaaagcttctggtcggatgtggtgcgcacggtgcccgatcacctgtatgtgcaagacgtgatcagccagcgcatgattttcagcaaccaccatctgggccacaccctgggctacaacaaggccgaactgcagcagatgggtgagtacttctgggaaatcctgctgcaccccgaagacgccgagcattaccacgacttgcgccagcagcaacgccaagccgcttacaccacccaactgcactgccaactgcgctttcgtcaccgcaataaccagtggcgccgcttcgatatccgcgaacaggccctggcccgcgatacgtccacagtggtcacccgtatcatcggcgtggccaaggacatcaccgaccagatcgaggccagtgaatcgctgcgcgacagtgaacagcgctaccggatgctggccgaaagcatcagcgacgtgatctgctccaccgacagccaactggccctcaactacatcagcccatcggtcaacaccgtgctgggctatgacgtggactgggtgttcaagaacggctggcagtcgatcgttgccaaccctcagcagttgaccggcatctacaacctgatggaacaggtcagccgcgccctcggcaaccccgacgccttgaacaccttgcgcgatgaagtccagacccaactgtttctgttcgactgcctgcgcgccgacgggcgcaaggtgccgatagaactgcgcctggtgctggtgtgggatgagcatggcgggtttgaaggcatcctcggcgtgggccgcgatatcagccagcaacgccgcgccgaaaaagacctgcgcatggcggccacggtgttcgaacattccacctcggcgatcctgatcaccgacccggccggctacatcgtgcaggccaacgaggcgttcagccgggtcagcggctatgaagtggcggatgtgctcgaccaattgccgaacatgctcaccgtcgacgagcagcaggaagcccatctgcgttatgtactcaaacagctgcatcagcacagcacctgggaaggtgaagtgtggctcaagcgccgcaatggcgagcattacccggcctgggtgggcattaccgcggtgttcgacgatgaaggcgacctggccagctacgtgtgtttcttcagcgatatcagcgagcgcaaggccagtgagcagcgcatccaccgtctggcctactacgacgccctgacccacctgcccaaccgcaccctgttccaggaccgcctgcacaccgcgttgcagtccgccgaacggcagaagtcgtgggtggtgctgatgttcctcgaccttgaccgctttaagccgatcaacgactccctcggccacgccgccggcgaccgtatgctcaaggaaatggccacgcgcctgctcggctgtgtggccgaggacgacaccgtggcgcgtatgggcggcgacgaattcactttgctcctgcaaccgcgagtcagccgtgaaatggcgctgaaccgtgcgatccatgtggccgagcagatcctcgccagcctggtcaaaccctttgtgctggagggccgcgaattcttcgtgaccgccagtatcggcatcgccctgagcccgcaagacggcaacgagctgagccaattgatgaaaaacgccgacacggcgatgtatcacgctaaagaacgcggcaagaacaacttccagttctaccaggccgacatgaacgccagcgccctggagcgcctggagctggaaagcgacctgcgccacgccttggaccagaacgaattcgtgctctattaccagccgcaattcagcggcgacggcaaacgcctgaccggcgccgaagccctgctgcgctggcgccacccgcgtcgcgggctggtgccgcctggggatttcatccccgtattggaagagctcgggctggtggtggatgtgggcgactgggtgattggcgaggcctgtcgacagctcaagacctggcaccagaacaaggtgcgcgtgccgaaagtctcagtgaacatctcggcgcggcagttctccgacggccagttgggcacgcgcatcgccaccatcctcaaggacaccggcctgccgccggcgtgcctggagctggagctgaccgaaagcatcctgatgcgtgaagtcaacgaagccctgcagatcctcgccagcctgaaaaacctgggcctgagcatcgcggtggatgactttggcaccggctattcatcgctcaactacctcaagcaattccccatcgatgtgctgaagatcgaccgcaccttcgtcgacggcctgccctcgggtgagcaggacgcgcagattgcccgggcgatcattgccatggcccacagcctgaacctggcggtgattgccgaaggggtggaaacccatgagcagttggacttcctgcgtgagcatggctgtgatgaggtgcagggctacctgttcgggcggccaatgccggcgaatcggtttgaggtgcagttcagtaatgatgcgctgttcatgtttgactgaaagtgccgtccctgatcgttcccacgctccgcgtgggaacgcaattctggacgctctgcgtccgcttttaaatgtgacgcagagcgccacgggatgcattcccacgcagagcgtgggaacgatcaggggctgagtgaaaaccacttgtccgcgacatgatgtcctttcatatgccatctaaaacccattgggttagaatgccctccttttctgcccccgatccttgaggaccgccatgttcagccgtgatttgactattgccaagtacgacgccgatctcttcgccgccatggagcaagaagccgtgcgccaggaagagcacattgagctgatcgcttcggaaaactacaccagccctgcggtgatggaggctcaaggttcggttctgaccaacaagtacgccgaaggctacccaggcaagcgctactacggtggttgcgagtacgtcgacgtggttgagcagttggccatcgaccgtgcaaaagagctgttcggcgccgattacgccaacgtccagccacatgccggctcccaagccaacagcgccgtgtacctggccctgctgcaaggcggcgacaccattctgggcatgagcctggcccacggcggtcacctgacccacggcgccacggtttcgtcctccggcaagctgtacaacgccgttcagtacggtatcgatgccaacggcctgatcgactacgacgaagtcgagcgcctggcggtcgagcacaagccaaaaatgatcgtggccggtttctctgcctactcgcagatcctggacttcccacgtttccgtgaaatcgccgacaaggtcggtgcctacctgttcgtggacatggcccacgtggccggtctggtggctgcgggcgtttaccccaacccagtgccttacgctgacgtggtcaccaccacgacccacaagaccctgcgcggtccacgtggcggcctgatcctggcgcgtgccaacgccgagatcgagaagaagctcaactccgccgttttcccgggcgcccaaggtggcccgctggagcacgtgatcgcggccaaggcgatctgcttcaaggaagcactgcagcctgagttcaagacctaccagcagcaagtggtcaagaacgccaagaccatggccagcgtgttcatcgagcgcggttttgacgtggtgtccggcggtaccgaaaaccacttgttcctgctgtcgctgatcaagcaggacatttccggtaaagatgctgacgctgccctgggcaaagccttcatcaccgtgaacaaaaactccgtgccgaacgacccacgttcgccgttcgtcacctccggcctgcgcttcggcactccggcagtgaccacccgtggcttcaaggaagccgagtgcaaggaactggcaggctggatctgcgacatcctggcagacctgaacaacgaagccgtgatcgacgcggtacgtgagaaggtcaaggccatctgcaagaagctgccggtatacggcgcgtaactgcagttgcttgaataaaagcccggcttttgtgccgggcttttttatgccgatttcaatttgaaacagggttttctgtgggagctggctttgcctgcgatggcggttttgcagtcagcccatcagtgattgccccaccgctatcgcaggcaagccagctcccacattggagtgcatttcaagccgggtttattggtagacccgctcaaagccttggcgaattttgtcttcgggcaactcatcggcaataaacacaatgacactttcgcgcacttcgccctcggcccattcggtatcccagtcgaagccatagagcttcagcacgccctggaacaccatgcgccggtcttccccggcaatattcaacacacctttgtagcgcagcagttgcttgccatgatcttccagcagttcgttcatgaactcgctgaggcggtcgatatccagcggctggtcggtgcgcagtaccaggctggaaatgcggtcgaccgaaggcgctgcattcaccgggcgcaggctcatgccggcgttgaggttgaagccgcgcacatccagcaactcggccaggtcaatcttgccgtggtccaccacacgaatcggcgcacggcggttgatgcgggtgaggcgctggctgagggcctcgaaggcggcatcgtccaccaggtcgcgcttgctcaccagcaggcggtcggcaaagccaatctgggcctgggcgatggtctgggtcaggtgatgctcggcgtgggccgcatccaccagggtgatgatgccgtcgaggatatagcgctcgcgcagttcttcgtcgatgaagaaggtctgggccaccggcgccgggtcggccaggccggtgcattcgatcaccagccggtcgaaggcgatctcgccgctgtccaggcgttccagcagcaggtacagggctttggtcaggtcggtgtgaatggtgcagcacacgcagccgttggacagggtcatcacttgcaccggctcgtcgcccagcagttgggtgtcgataccggcgtcactgaattcgttttcgatcacggcgattttcaagccgtgctcggctttgagcaggtggcgcagcaaggtggtcttgccggcgccgagaaagccactgaggatggtgacggggatgggagaggacaagagattctccttgaagaaaaacagaaacaaatgtgggagcaaaggcccctgtgggagctggcttgcctgcgatgcagacaactcggtgcttgcgtcagaccgaggtgatgctatcgcaggcaagccagctcccacagaaagccctgctcccacaggcatattgcattggcccgcgttaccaggctagcagcacttgggcccacccttgccgccgtaacgggcttcctggcgttcccggaagaacgccttgtagtccatcaccggcttgtccgggtgtttggtttgcatatgctcgacgtaggtgtcgtagtcgggcatgccgaccatcaggcgggcggcctgaccgaggtatttaccgaggcgactgatgtcattgaacatgtttgcaatcctcgtttacgcgtccggtacagcctggaacggggcttctttatccgtacgctctttgttgccccaggcggcgacacccaccttcagcgcatagaacaggatgctgaacaccacgaacaggaacagcgccgtcagcgttgcgttggtgtaggcgttccagatcacgtgctgcatctggtcgatgctcttggccggggccaggatctggccgttagccagggcatcgctgtatttcttggccaacgacaggaagccgatcgccgggttggcgtcgaacagcttgatgaagcctgccgtggtggtgcagatcaacagccacaccgccggcaacatggtcacccagatgtagcgctggcgtttcattttgatcagcacaacggttgccagcatcaacgcgatacccgccagcatctggttggagataccgaacagcggccacaaggtattgatcccacccagcgggtcgatcacaccttggtacagcaggtaaccccacatcgccacacaaccggccgtcgcgatcaggttggcggtccaggactcggtgcgtttgagcgccggcacgaacgaacccagcaggtcctgcagcatgaagcgaccggcacgggtgccggcgtccacggccgtgaggatgaacagcgcttcgaacaggatcgcaaagtggtaccagaacgccatggtgttttcacccggcagcacactgtgcaggatctgcgcgatacccaccgccaacgtcggcgcaccgccggcacgcgccaggatggtggtttcaccgatatcgtgggccacggcagagagcgcctcaggcgtaatggcaaagccccaactgctgaccgtctgcgccacggtaaccacgtcggtgccgacaatggcagccgggctgttcatggcgaagtacacgccaggctcgatcaccgaggcggcaaccatcgccatgatggccacgaacgactccatcagcatgccgccgtaaccgatgtaacgggcatggctttcactggcgagcaacttgggcgtggtgcccgaagagatcagcgcgtggaagcccgagaccgcgccacaagcgatggtgatgaacaggaacgggaacaggccgcccttccacaccgggccggtgccgtcgatgaactgggtgagtgccggcattttcaggtcaggcatggtgaccagaatgccaatcgccagggcgatgatggtgccgattttcaggaacgtcgacaggtagtcgcggggcgccaggatcagccacaccggcagcacagcagccacgaagccgtagccgatcagcatccaggtgatttggataccggtgaaagtgaacgccttggcccacactggatcagcggcaatctgcccgcccagccagatcgaacccagcagcaacagcacgccgatgatcgagatttcaccgatgcggcccgggcggatgtagcgcatgtagatgcccatgaacatcgcgatcgggatggtcgccatcaccgtgaagatgccccatgggctctcggccagggccttgaccacgatcagcgccagcaccgcgaggatgatgatcatgatcaggaagcagccgaacagcgcgatggttccgggaatgcggcccatctcttcgcgaaccatgtcccccagggaacggccattgcgacgagtggacaggaacaggaccataaagtcttgcaccgcaccggccagcaccaccccggcaatcagccacagggtaccgggcagatagcccatttgcgccgccagcaccgggccgaccaacgggcctgcaccggcaatcgccgcaaagtggtgaccgaaaagaatgtgtttgttggtcggtacatagtccagaccatcgttgttgaccaccgcaggggttgcccgccgagggtcgagttgcatcacgttgttggcgatgaacagactgtagtaacggtacgcaaccaggtagatggccactgcagcgaccacaatccacaaggcgttgatcgcctcgccgcggcgcaaggccactacgcccagggcgcacgctcctacaattgccagcaccagccagggtaagtggcgtagcaggctattattatttttcatttttatattccagccagggtggacagaaaggacagccagcccgagtttagcgctactggccttaaagaccagccccctacgttggtctagagccttcaaccggtaaaaaaagccgaaataatcgccccttgatggccccgggctacactccccccattcacagagggttttaccatgaccgagcatgcgtctgaacgtcgccgttttcgccggattgcctttgatgccacggccgaacttcggcaaaacggcagcgaatcgccggtgaaactgctggatctatcactcaagggtttactggtggaacggcctgacgactggaagggaaataaagcgctgccctttgacgtcgacatacgcctggaccagaagacgcatataaagatgcaagcgcggctgacccatgaagatcagggtcaattgggctttgtatgcaagcacattgatctggactcgatcagccatttgcggcgctttgtagagctgaacctgggtgatgagcaagagctggaacgcgaactgggcgctctgctggagatctagctgccaacatgaatcaagggtgggagctggcttgcctgcgatgacggtgtatcaggcaaggatgggtaagctgacccgccgctatcgcaggcaagccagctcccacaggggttcagcagtgttgcggattattcgaacagcgcatccaacgcctgttccaagcgtgtcacagcaatgatctgtaaccccggcggcgcctccttcggggcattgcccttgggcacaatcgcccgtttgaagccatgcttggccgcttccttcaagcgctcctgcccactcggcaccgggcgcacttcacccgacaaacccacctcgccaaacaccagcaagtcatggggcagcggccggttacgcaggctggacatcaccgccgccatcaacgccaggtcggacgcggtctccaacaccttgaccccgcccaccacgttaaggaacacatcctggtcgtgggtcggaatgccgccatgccggtgcagcaccgccagcaacatcgccaggcggttctggtccagccccagcgtgacccgccgagggttggccaaatggctgtcatccaccagcgcctggacttccaccaacatcggccgggtgccttcccacgtcgccatcaccacactgcctgggacttcttcctgggcgcgggtgagaaaaatcgccgaggggttcgagacttctttcagcccccggtcggtcatggcgaacacacccagttcgttgacggcgccaaagcggttcttcaccgcccgtagcaggcgcaggcgaccgtcggattccccttcgaaatacagcacggtgtcgaccatgtgttccaacacccgtggcccggccagtgcgccttccttggtgacgtggccgaccaggaagatcgccgtgccgctctgcttggcgtaacgcaccagcagcgcagcgctttcgcgcacctgggacacgccgccgggtgccgactgcagctgttcggtgaaaatcgtctggatcgagtcaatgaccatgactttgggtttttcgatgcgcgccgtggcgatgatgctttcgatgcaggtttcggtcatcacccgcaactgatcctgaggcaagcccaggcgccgggcgcgcatggccacttgctgctgggactcttcgccggtgacatacagcgctggcatacggctggcgatgctgcacagggtttgcagcaggatcgtggacttgccgatgccagggtcaccgccaatcaataccaccgagccgtccaccaggccaccgcccaagacccggtccagttcgccggaggcggtggaaaagcgcgggatctcttcgacgctgacttcggccagggtcttgatctgcgcctgttgcccagtccagccggcacggccggtgggggccgcggcaccgccgctctcgatcatggtttcagtcagggtgttccacgcgccgcattcggagcactggcccgcccatttgggaaaggtcgcgccgcactctgtgcagccgtacatgcgcttggcctttgccatatgagaacctccaaccgaaaaaccgcgatgatagctcagcgcgacgctggggtccggatttcgcccttggctaaacgtgaagcgctgttcccgaccgggtcttcggcgttcagatcggcgcctttggcttgcagcgcccccagcaactcgacgcgcttgaatagcccggcatacatggcggcggtctgccctgcgccgttgcgttggtcagggttgcagtcggtggccaacaggcgctgggcgattttcagctcgcctttgaagatggcgcccatcaacgctgtgttgccgcgtttatcctgcacacaggcgtcggcgccggcatcgagcagacgctccacatacgggccctggccgtgataagcagccaggatcaacgcggtgtagcccttgtcatcctgagcattgaggccgtaaccggactctatgaaggtgttgagcatgtcgaggtcgccacgacgggcggcgtcgaaatagtagtcctgcaactgcgccttgagcgccaccgggtcgggagactcggcatgggcagcgaaggccagcatggccatcagtaaaccgatagagatgcgcatagggtgttctcctgccaaaggtcgacgcccgtgaaggcgccgaccgcaaccaacgaatcagtcagtcagtttttccgccagcgccttcacgcgagccagatcgcccttggcgaccttggccacgccggtgccgtattccggatccgccttgtagaggaacgacaggatgatgtgcttgctctcgtcatcggtggtggccaatgagccgccgaagttgttgatcaagtcctcgcgctctttcttggtgtaggaacggtacagatcaccggcctgcttgaagttctgctcacgctggatcttggcctgctgggtgctgcccgacagcggcgactggctgtagcgcgcggtttgcggctcttcgcgtggcaacaggcggcttggctggtagttcacgccggtggtggtcttgccgaagttcatcgcgccgtcctggttgccgttgttgacggtgacccgtggagcgttgatcggcagttgcagggcgttcgcgcccaggcggtacatctgcgtatcggcgtaggagaacacccggccttgcagcaagcggtcttccgacggctcgatacccggtaccaggttggccggggccatcgccacttgctcggtttcctggaacacattggccgggttgcggttcagcaccatttgcccgactttgcgctcgggcacattcggccagattttggtggcatccagtgggtcgaaatcaaacttggccaggtcttcaggcttgagcacctgcacatacaagtcccacttggggaagtcgcctttgttgatgtgcgtgaccaagtcattggtcatatggctgtagtcacggccttgcacttcgctgacttgttttggatccaaattcttgatgccctgcaggctcttccaatggaacttgacgtagtgcacttcacctttagtgttaatcaacttgtaggcatgtacaccattgccgtccatttcgcggtaactggctggggtgccggagtccgagtacaactcggtcagtgtacgagtggactctggaacatgggagaagaagtcgaaacgacgcgagtcatcgtccaggttagtgcgcgggtccggtttaaaggcatggaccatgtccgggaacttgatggcatcgcgaataaagaacgtggggaagttattgccgaccaggtcccagttaccttcggcggtatagaacttggtggcgaagccccgtgggtcccgcagggtttcgggggagtggttgccatgcaccacagccgagaagcgcacgaacaccggtgtggtttcaccggcggcgaatactttggccttggtcaggtcgctgaggttgtcggttacggtgaaggtgccatgggcgcccgtgccgcgcgcgtgtactacgcgctcgggaatgcgttcgcggtcgaaacgctgcagcttctggatcagttgcacatcttgcagcagcaccgggccattggcgccggcggtctgggagttctggttatcaccgacgttggccccgttatcgcgggtcaggttcgcggcttgtacggagagggaaagcaggctggcggtcaccagtgccagcgcatggcgcgccgacacgggcctgcggctgattggagtgttcatcgaggtttcctctggtttttttagcgcacattctgttgtgcttgtcagaggctagtgacctgcgagtcagaagataaatagaaaaacaccacaggcccgattaagaaaataatctggtaactcgctgaaatagccggtaattcgcgcgcgattgatggcactttgcaaactatttgcgatttgatgtgtcgataaaaaccgacagtgttaacagttgtgtcgagcaagcgctgttcgactgaattacactgacctccaccctcctcaactgtaacaaggaataacctatgggcgtgatcagtgagttcaaggccttcgcggtcaaaggtaatgtggtcgacatggccgtcggtatcatcatcggtgctgccttcggtaagattgtttcctcatttgtaggcgacgtgataatgcctcccatcggcctgctgatcggtggtgtggactttgccgatctggccatcacgctcaaggccgcacagggtgatgtacctgcggttgtgctggcgtacggcaagttcatccagagcatcatcgactttgtgatcgtcgcgtttgcaatcttcatgggcgtgaaggcgatcaaccgtctgaagcgcgaagaagccgtggccccaagcctgccgccgacgccgagcaaggaagaagtgctgctgggcgagatccgcgatctgctcaaggcacagaacaacaagccgctttaacccgcggttgcaaaaaaaaggcgcctcgcaaggcgccttttttctaccagtagttttctaccgccacctggccaggccgtcggctcaggctcagttgcatgtcccgctgcttgagcaactggcgcgtgtcatcgaccatctgcgggttgccgcaaatcagtacgcgcgaatcctgcgccgtcagctccacgccggcggcccgctccaattcgccattttcgatcagggccgtaatacgcccgttcaacgcgcccggatgcagctcgcgggtgacgatgggaatgtaggtgagcttgtgggcgtaatcggccaggtactcacgctcaaccagtgtgttgatcagcgactggtaggccagttccttggcttcccgggcgctgtacaccaggatgatgcgctcgaatttttcccaggcttcgaagtcctgcaggatcgacaggaacggcgcaatgcccgtaccggttcccagcatccacaggtcgcgcccgtcgacaaagcggttgagggtcagaaaacccgtggcctggcgctctaccagcaaggtatcgcccaccttcaggcggctcagttcactggtgaactcaccgccggggaccacgatggaaaaaaaatccagatgctcgtcaaacggcgaagacacgatggaataggcacgccagacggtactgccatccgccttggtaacgcccaggcgcacgaactggccggcggtaaaacgaaaaccggcatcgcgggtggtgcgcaaggtgaacaggctgggggtcagcgattgcacatcgagcagggtctggcgggtaaatttctcagcactggccgtcatggggggctccgttttgcacaggccgttagtgtccctcaaaacagaccgcgcaaacaccgatgattgatactggctttgcaatcgctgaaggctcgcgcagctggcgcgcgcgtttttgagccagccaggggctacaccatgggcgcctcagtggaactaattatttggctattaatgcacccgaacacctcactagatgaaacagcacttacaacgacatcattttgatactgtttttaagacattaaaaacgttgaaaaaactttcgctgccaagtgcccttatacaaaactccaagccttatacaaaaccggcgtgcgaaacaaaccctgtaagtaaaatatttttcagactcagttgtaggacttcccctacacttgttttcgagttgcattgggagatcaggacgtacccaagtcacacagaaacctatggagagtcaccgatggtcaattggcataacacccggctgcccaagctggaaggcgagagtgaaatcaccagtgtgtttgagatggtgattaaccacacctatgagctgggtttcgaatattgctcttttacgatgagctcccagtcacaagacactcaaacaaaacccattctatttagtaactatccaaacgaatggagccacatttataaacaagcacactacttcgatgtagaccccgttgtaacccactgcaaaagttcggtactgcccattctctgggagcaaaaaacctttgccaacaccccccagttgtgggagctggcccagtcctgcggggtgcatttaggctggacccaagccgtgcatgatttccagggtgtattcagcatgctgaccctggttcgcagcaagggcgaggtcagcccgcaagagctttacgaaaaagccggccaggtgttgtggctttgccatgcaatgcatgcggtcgtcgcgcagaagtacgccgacgcgcccgagatcaaagcgcccagcaaattgaccgcccgggaaacggaaatcctcaagtggtctgcgatgggcaagactgcttccgagatcgccgcgattctttgcctgtccgaacgcaccgtgggctttcatatcagcagtaccttcaagaagctgggcgtgcacaacaagatccaggccgtgctgcgcgccgctaaagccgggctgttttagcccacgcaaaacaccgcatgtcatcgcgttgaaaaaaacgtaacatttacggccaattctgagtgttgagggtgcgcttcccatggttgccccgccgttcactcagacggtccgtcgattacccagagccttgccccgccatgcccctgcttgacagccctttcgcccagctcgacctgattcgtcagccagagcaacacaatgatccgctgcaagccttcgatgccgccgacgaatacctgctcagccacctcgccgcgcagcagcctactgccgccacccgcgtgctggtcctcaatgacagcttcggcgcactggcggccagccttcaaggccaggtgcaggtgacctccagcggtgactcgttcctcgcggcccagggcctggaaaaaaacctggtgcgcaacggcaaaccctttgatgccgtgcccatcataccggccagccagcttgcgaccgggccgtttgatcgcgtattgatccgcgtgccgaaaaccctggcgttgctggaagaacaactgatccgcctgcaagggcaactggcgcccggcgccgaggtgatcgcaggtgcaatggtcaagcacttgccccgggctgcgggcgaattgctggagcgttacatcggccccatgcacgcctcattggcggtcaaaaaggcacggttgctgatcgccagcgtcgagcagcgccctgccgcggtctcgccctacccgacccgctataccctggatgcgccggtcatcgagttgtgtaaccacgccaacgtgttttgccgcgaaggcctggacatcggcacccgcgccttcctgccgcatctgccaaaaaacctgggcagtgcccgcgtggcggacctgggttgcggcaacggcgtactggcgattgccagcgccctgcacaaccccgatgcgcattacaccttggtggatgagtcgtacatggcggtgcaatcggccgccgaaaactggcaagccgccttgggtgaacgggacgtcaccgtgcatgccggcgacggcctggccggccaggagccgcagtcgctggacgtggtgctgtgcaacccaccgtttcaccaacagcaagtggtgggcgacttcctggcctggcgcatgttccagcaggcacgcgaagcgctggtggtcggcggcgccttgtacatcgtcggcaatcgtcacctgggctaccacagcaagctggcgcggctgttccgtggcgtcgagcaagtagcggccacgcccaagtttgtcatcctcaaagcgcgtaaataaaaaacccctgcttatttgtaggagcgagcttgctcgcgaaaaacgtcaacgataacgcggggtacctgacgccccgcggtgttctcagtttttttgcgagcaagctcgctcctacattattggtgtcagtgcgtgctcaggcctgccgcattcatgaacatgcgcatcaggctggccaccacgaacagggccagcacgctgccggtccagatcatcgccagccaccccaggcgccgccacaacggctgcttctcggcctgttcaatctcgtgcaacgaaggtttggacatgtttcaaccctcctagtgatagccgtcttcgtgggtgaccttgccgcggaacacgtagtagctccagaaggtgtagcccaggatgaacgggatgatgaacagcgtgcccaccagcatgaagccctggctttgcggcggcgcggcggcatcccagatcgatacggacggcgggatgatgttcggccacaggctgatccccaggccgctgtagccgaggaagatcagcaccagcgtcaacaggaacggcgtgtagtgcgcattacgtgccacagcgcggatcagcccgtacatggtgaccagcaccaggatcggcaccggcaggaaccagaacaggttcggcagggtaaaccagcgcgacgcgatttccgggtgggtcagcggcgtccagatgctgacgacgccgatcaccgccaacacgacaaacgccaaaggccgcgccaggttgtgcatctgctcctgcaacttgccttcggtcttcatgatcagccaggtgcagccgagcaaggcatacgccacgattagcgccacaccgcagaacatcgtgaacggcgtgagccagtccagtgagccgccggcgaactggcggtccaccacggggatgccgtcgataaaggcacccagcgccacgccctggaagaaggtcgccgccagcgagccgccaataaacgccttgtcccacaggtgacgcttgtggtccttggccttgaagcgaaactcaaaggccacgccgcggaagatcagcccgatcagcatcaggatcagcggcaggtacagcgccgacaacaccaccgaataggccagcgggaacgcgccgaacaacgccgcgccgccaagtaccagccaggtttcgttgccgtcccatacgggcgccacggtgttcatcatcacgtcacggtcgactttgcccgggataaacgggaaaagaatgccgatccccaggtcgaagccgtccatgaccacgtacatcatgatgccgaagatgatgatcacggcccagatcagcggaagatcaatacccatctcaattccccttgtgctggatgtggtcgtggtcgttatcactgccatcgtcggcagcagacaatggacgcgccggcgtgcgtttctggccagggccgccatgggtcggctcggtactgtcgtgggtcacggggcctttgcgcaccaggcgcatcatgtagcccaggcccgcgccgaacagcgcgaagtacaccaccacgaacaacaccagggtaatggtcatctgcgtcaggctatgcccggaggaggcatccgccgtgcgcatcaagccgtagaccacccagggctggcgaccgatttcggtggtgaaccaaccggcaagaatcgcaatcaggccagatgggcccatccacaacgccaggtacaggaacggcttggacgtgtacatcttgtcgccccggcgcagccacaggctgaacagaccggtgaagatcatcaggaaccccaggccgaccatgacccggaacgaccagaacacaatggtcgagttggggcggtcttcaggcggaaactccttgagcgccggcacctgcttgtccagggagtgagtcaggatcaggctgcccaggtacggaatctcgaccgcgtacttggttttctcggctttcatgtccggccagccgaacaggatcagcggcgtgggctcgttgccgatattttcccagtgaccttcaatcgcggcgattttggccggctgatgcttgagggtattaaggccatggaagtcgccgatcaccgcctggatgggcgcaacgatcagcgccatccacatcgccatcgaaagcattttgcggatcgctgggttgtccttgccgcgcagcaaatgccaggccgccgacgagccgacgaagaacgccgtggcaacaaaagcagccgtggccatgtgcatcaggcggtaggggaacgacgggttgaagatcaccgccagccagtcagtcggtatcacgcggccatcgatgatttcaaagccctggggcgtctgcatccagctgttggaggcgagaatccagaatgtggagatcagcgtacccacggcgaccatcaccgtggcgaagaagtgcagcttgcgccccaccttgttccagccaaacaacatcacacccaggaaaccggcctcgaggaagaaggccgtgagcacttcgtacgtcagcaacggcccggtgacggcgccggcgaagtccgagaagcggctccagttggtgccgaactggtaggccatgaccaggcccgataccacgcccatgccgaagttgacggcaaagatcttcgaccagaaatggtagaggtcacggtaggtatcgttatgagtcttgagccacaagccctccagcaccgcaaggtaactggccaggccgatggtgatcgccgggaacaggatgtggaatgagatggtgaacgcgaattgaattcgggcgagatctagcgcctccaaaccgaacataagtcttcctctgtcaggtaataccggctgctggctgggagcctgcacccactgcccccacggatatggagtgtggcgaatttcaattcgtttcttttattacccatcgcgtggggaatctggcctttcggccaccagaacaatcccggggcaggttttgatctggatcaagcatcgttgaaagagtagtcccatttttgcggtaggactgtgtggtcttttgccgcgtgacagcttgcctcagctcagttcttgcaactatttgttacagcttgatgctaatctcgcccttctcccgttgccgacctgattgccgatgcccattgaacctgcgttgctgttacgtcaccaccgcccttttatcgcgttctggctggcgcggatctttaccgccagcggcttccagatgctcaccgtggcgatcggctggaacctctaccagctgaccggcaacgtcttggacctgggcctggtcggcctggtggaattcataccgcgcgtgctgttcatgctgcacaccgggcacgtggctgatcgctatgaacgccgcagggtcgccgctatctgccagaccttgcaggcgctgattgccttgtccctggccatcggtggcctgaccggcaacgtgacccgcgagatgatctttatcctcgccttcctgctgggcgccgcgcgctcgtttgaaatgcccaccacccaggcgctcttgcccagcatcgtgcccagcgcgctgttcccccgcgcggtggccgcctcgcaatcggcccagcaactggcgaccatcgtcgcaccggccgtgggcggtttgctttacgcgtttggcagcgtgtgggtgtacggccccaccgtggcgctgtacctgatcgcctgcgtgctgaccctgaacttgcccgcgcgccagactccgctgaacaaagccaaggccaccctggactcgctgctggccggcattcgttttatccgcagccgcccggacattctcggcgccatctccctggacctgtttgccgtgctgctgggcggcgccaccgcgctgttgccggtgttcgccaaggacatcctgctgaccggcgcctggggcctgggcctgctgcggtcggcaccggccgtgggcgcgttgctgatgtcactatggctggcgcgcttttcggtcgaccgccaggtgggccgcgtgatgttcactgccgtcggcgtgttcggggtggcaaccattgccttcggcctgtcgacctcgttctggttttccctggcggtgctggtggtactgggcgcggcggacatgatcagcatggtgatccgtgcgtcgttcgtgcagttggaaaccccagatgaaatgcgcgggcgggtgagtgcggtcaatggcctgtttatcggcgcctcaaatcaattgggcgagttcgaatccgggataaccgcccactggtttgggaccgtgcctgcggtggtgatgggcggggttggtacgctggtggtgaccggggtgtggatcaagctgttcccgaccctggctaaccgggatcgcatgcatgtgccggtggaagaaaccaagttataggcgtcaccgccataccctgtgggagccgggcttgcccgcgatagcggtgtatcaggcaactttctggtggctgatacaccgctatcgcgggcaagccagctcccacattggaacttcattgacctgacggtttgcgctacaacaccttatccaaggtaatcggaaactcccgcacccgcttgccggtggcgtggtaaaccgcattcgccaccgccgccgccaccccgacaatgccgatttcccccacgcccttggacccgagcgcattgacgatctcgtcgtgctcttcgacaaacagcacgtcaatctcgccaatatcggcgttcaccgggatgtggtactcggccaggctgtggttcatgtagcgccccagctcatggtccacctgggtctcttcatgcagggccatgccaatgccccacaccacgccgccgaggatctggctgcgggccatcttggggttgaccacgcgcccagcggcaatggcgctgaccacacggctgaccttgatggtgcccaggtcttcgtccacccgcacttcgacgaacaccgccgagtgagtagcgctggcataaccctcgcgcttcttgtcaggctggctgtcgatctgtacctccagggtgtcttcaccgctgtccttgaccaattgcgccaacgacacgctcacatcaccgctgtgtagctggccgtcttcaaaccgaaccgaatcggcatccttgaataccgggtaagtctggcgggcgatcttcagtaacctggcattcagcgcttcgcacgcttgctgcacggcagtgccgacggacgagacggtaaacgagccgccctgcaacggcgcagtgggcaacgacgaatcgcccagcacaaagcgcacgtcagccatcgccacgccactggcctgggaggcaatctgggtcatcacggtgtaggtgccggtgccaatgtcggtggtggcgctgctgacggtgagcttgccgtccgcgtcgaggcgcgccttggcgctggctttcatctgcatggcttcccacacgccgccggccatgccccagccgatcaactggcggccgtcacgcatgctgcgcggttccgggttgcgttggtgccagccgaagcgttcggcgccttcgctgtagcactcgcgcagggccttgctcgaccagggtttgtcttcgttctggttacgttcggcgtagttgatcaggcgcaattgcaccggatcgatggccagggcgcaggccagttcgtccatggcgcactccaggccaagcacgccaagtgctgcaccgggagcacgcatatccagcggggtaaacacatccaacggcgccagcttgtaggtcagctgcacgttgtcgcagtgatagagcatgccgctccactccaccacgtgctcgctgaaatcttcgaagcgcgacgtctggccaatcgcggtatgccccagcgccagcaagcgcccattggcggcggcgcccatctgcaaacgctgcaaggtgcgcggacgatagccgaaggtgaacatctgctggcgcgtcagggtgacccgcaccgaacgcttgagcgccatggccgccatcaccgcgagcggcaattggtattgcgggcgcaagcccgaaccgaaggcgcccccgacaaaggcagcgaagatgcgcacctggttcttatccaggccgaagactttttgcacataggcctggcagttctgcgggccctgggtcttgtcgtgaatatgcagggtgccgtcgggctgatacagcacggtgctggcgtggggctccatcgggttgtggtgctcgatgggcgtgctgtagtgcaagtccagactgattgcggcaccggcccattcagcctcgaagttgcctcgcggtttgggtggggtctggggcgacgggtgcgccgccgcttgctgggtgagcaggtcggtttcgaaggcttcaggcgcgtagtcgatctgcaccagcgagccagcgtgccgcgccagttcgaggttatcggcaatcaccaaggccaggggctggccactgtagagtacgcggtcgttatacagcgggcgaaaaggcgagccatcggccgcatcggcatcggcgaacgcctcatcatagctggcgattttcggccgattgaggtgatggatcacgtccaccacacccggcaacgccaacgccttggacgcatcgatgcgcagcactcggcctttggcgatagtgctcgacaccacgctgccatgcagcaggccgtcctcgggaaattcaccggcgtagcgtgcttggccggtgaccttgagcagaccgtcgacacggtccaggggtttaccgatggcgctcatggctgttctcctgcgacggcggcgtcgctcagggcacgaatgattgcgcgtcgcgccagcttgaccttgaagccgttgtgttccaacggttcggcgtcttgcagcagggcgtcggcggcggcgctgaaggtttcgcggctgaccgtgcggccgatcagcaaggcttccactgcgcggtcacgccagggtttatgcgccacaccgccgagggccaggcgggcgtcgatgatttcatcaccgtccagctccaaggcggcggccaccgaaaccagggcgaaggcataggaggcacggtcacggattttcaggtaatggctgtggcgggccaggtgatcggcgggcagctcaatggccgtgatcagctcatcgtcggccaattggttgtcacgttgcggcgcatcgcctggcaagcgatggaagtcggcgaactcgatcacccgcgcaccgccacgtccctctacatgcacccgcgctgcaagcgccgcgagggccacgcacatgtccgatggatgggtggccacgcactgctcactggcgccgaggatcgcatggatacggttcaagccgttgcgcgccgggcagccactgccgggctggcgcttgttgcacggcaccgcggcgtcgtagaagtaatagcaacgggtgcgctgcaacaggttgccgccggtactggccatgttgcgtaactgcggcgacgccccggcgaggatggcctgggacagcaacgggtaacgctgctcaatgagcgggtgccaggccaggtcggcgttgctcaccagcgcaccgatacgcaggccaccctcggcggtctcttgaatgtcatgcagcggcaagccgttgatgtcgatcaggtgctcgggatggctgatgttttctttcatcaggtccagcaggttggtgccaccggcgataaagcgtgaggcggcactgctcagctgtacggcctgctgcacatcggtcggcctgctgtagtggaagggattcatgactcacctccctggcgacggcaggccggcagcgcgtcttcgatggcatcgcggatgttgttgtaggcaccgcagcggcacaggttgccgctcatcaattcctggatctgcgcacggtcgtgggcgcggccttcattggccaggcccacggcagaacagatctggccgggggtgcaatagccgcactggaaagcgtcgtgctggataaaggcctgttgcatggggtgcagttggtcgccgtcggccaggccttcgatggtgatcaattcggcgccgtcgcacatcacggccagggtcaggcaggcattcacgcgtttgccgtcacgcaacacggtgcaagcgccgcactggccgtggtcgcagccttttttgctgcccaccaggtccaactgctcgcgcagcaagtccagcaaggtggtccagggcaacacgttcagttggcgagcctggccgttgagtgtcaggcgtatcgggtgggtgacgaacggctgggccgccgcgccattgggggtcgcgctcataaacacctcacgggttggtgtacgtccgcggcgttctggaaaatcgccgtcttaggggtacgacttcccggttttttgagcgttcaagatgattgatcagcggatattgagctgggctttcagggtgttttgcggcgggttgatcgaggtattggtgaattcgaaccagccctgggcctggacgttcaggtcgaacacatagatgtagcccatcaaggtgccgacgccgttgcacgcctcactgatgttgccgacctggcacaccgctgtgcgttgcccattcaactctgcgccgttgaagcggcccatggggctgttgcccaggccaacttccatcaccgagacctgggtgggcccgcggtgctcgcacatctgggtagtgttgacccgctccgggatcgcttcgctgcacttggccgattccaccttgaacacccgcacctcgctcaaggccggtgcagccgcgccccatgccggtgccgcgcccagccacaggctgatactgacgatcagagctagactccacgggttggcttttttcatgctgtcgatgaccggctgttgaacgtcggcgcagtatgcctcaagcccatgcgccacacagcctcggctgctggtatgatgcgccgctttttccgatcctctctgaaaccacaagcgtttggcgcagtttgtgctttgacttagaggtcaacaaatcacgacgcacactagcgtcacagggagccggcatgctggaaaagctgtttcaactcaaagcccacaacaccaatgtgcgcaccgagattctcgcggggatcaccacctttctggccatggcctacatcctgttcgtgaacccgagcatcctcggcgagaccggcatggacaagggcgcggtgtttgttgccacctgcctggcggcggccatcggttcgaccgtgatgggcctgatcgccaactacccgattgccctggcaccgggcatgggcctcaacgccttcttcacctacaccgtggttctgcacatgggccacacctggcaggtggcgctgggcgcggtattcatttcggcggtgctgtttttcctgctgtcgatcttccgcattcgtgagtggatcatcaatgccatcccgctgccgctgcgctcggcgattgctgccggcatcggcctgttcctggcgctgatcgccctgcataacgccggtatcgtggtgagcaacccagccactatggtcggcctgggcgacctgaaacaaccggcgccgatcctggccaccctgggcttcgtgctgatcgtcgcgctggaggctctggccgtacgcggcgcggtgctgatcggcatcctggcggtgaccgttgcctccatcgtcctgggcttcacgccgttcatcggcgtgacctcggtaccgccgtccctggcgccgaccttcctgcagctggacatcaagggcgcgctggacatcggcctggtcagcgtgatcttcgccttcctgttcgtggacctgttcgacaactcaggcaccctgatcggcgtcgccaagcgcgccggcctgatgggcaaggacggccatatgccgaaaatgggccgtgcgctgattgccgacagtaccgctgccatggccggttccctgctgggtacctcgaccaccaccagctacatcgaatcggccgcaggcgtgagcgccggtggccgtaccggcttgaccgccatcgtggtcgcgatcctgtttttgctggcgctgttcttctcgccattggccgccagcgtaccggcctatgccaccgcgccagccttgctgtttgtggcggtgctgatgagccagggcctggccgaaatcgactgggacgacattacggtggcagcgccggtggtgatcaccgccctggcgatgcccttcacttactccatcgccaacggcatcgccttcggtttcatcgcctggaccgccatcaagctgctttcgggccgctaccgtgagctgaacccggcactggtgatcctgtcgatcctgtttgtgatcaagctgggctggttcaacgcatgactttcgacgccgcaagctacaccgctcaactgcaagacaaggtcacgcgcctgcgtgacctgttggcaccgttcgacgcgcccgaaccgcaggtctttgactcgccgctgcagcactttcgcctgcgtgcggagttccgcatgtggcgcgaaggcggcgagcgccactacgcgatgttctcccaggaggacaagcgcacgccgatcctcatcgaagaattccccatcgccagccagcgcatcaaccagttgatgccgcaactcaaggccgcctggcaagccagcgctgccctgagccacaagctgttccaggtggagttcctcaccaccctggccggcgacgcgatgatcaccctgtgttatcaccgcccgctggatgagcactggcacagcgccgcaaacaaattggccgctgagctgaatgtgagcatcatcggccgctccaagggcaagcgcgatgtgatcggccatgactatgtggtggaaaaactcgacgtcggtggccgcaccttcagctaccgccaacccgaaggcgcgttcacccagcccaacggcacggtgaaccagaagatgctcaactgggcctatgaagcgctgggcgaccgcccggacgatttgctggagctgtattgcggcaacggcaacttcaccctgccgctggcgacccgcgtgcgcaaggtgctggccaccgagatcagcaagacctcggtgaatgcggccctgagcaacctggatgagaatggcgtggataacgtcaccctggtgcgcctctccgccgaagaactcacccaagccctgaatgaagtgcgcccgttccgccgcctgcacggcatcgacctgaaaagctacgagttcggtagcgtcttcgtcgacccgccccgcgctggcatggacccggacacttgcgagctgacccggcgcttcgacaacatcctgtacatctcctgcaacccggagacgctggcggcgaacatcgcgcaactgcacgacacgcaccggattacccagtgcgcaatgtttgaccagttcccgtggacgcaccatatggaatcgggtgtgttgctgacccgccgataaacctgcaaggtaggcgcgagcttgctcgcgaaaaacgtcaacgataacgcgtgcttcctggatgaacgcggtgcctgtgggtttttcgcgagcaagctcgctcctgcagtttattcaagtgtctgttgtctctgggggctgcggggcttccttgcgtggccggccacccttcttgccattggcgcgagccgctgcggatttggccgcgctgcttttgcggccattgcgcgatgccaccaggctggttgccaggtccatcagcggctggcttgtagcgatcaaccctgtgatcgaaacatccaggtcctgcgcctcacagctaatcgccttgccaccgaacgtcacttccaactgctggaaatccttcgctgaaaacccttcgaactccggcaggccagccaccggcaacacgacgcggctgccatcgctgaagccaatggagaggcagtcgttttcataacgtacgttgctggcgttggcgtacaggcgtttcaacttgcgcccacgggcgattgccttgtcaacgtcggcttcagtgagaggtacataaggtgtgactttggcttttatgattttcataaattaatccccacgcaatctggcgctcttaccagattcaaaattgtccgttgcgctacgacgtcgtgcctggcgctcgcgatgacgtagacaccttgtcgaatgaccaaccccgggaccaactcgccagcgtcccaattccaggaatgattctccaggcaaaccgtctgcagtttttcccaccagatcctgcgtgcccgcgccaagtagtgccgctgcatgatcgccccgtgtatctccttcagaagtgctatgggcggccgcctccgttcaggctctacgtcccacaactcaacttccccatccaggaaactgaaacgaaaccgcgcatcccatcccttgcccctgacatgcacatggggcgggcaatgctcatccctgataaacaccgaaatgacatagcctttgtaagcgcctactctcatcgtaacccatccgttaggttattttccgccaggtaacaatttccctctgccacccgacaaccggctcctattcccgaagctgtttcacagattagtcaccacaaaaaacccggcgaatgccgggttgtaaccactcatgccgagggttggaaatacccggccagcgcccgcaagtcctgctcgctcagcaaccccgcgtaatacttcaactgaatacgcgccagcaggtaggcatgccgggcattggccagatcacgccgggcggtgaacagctgttgttcggcgtcgaggacgtcgaggttgacccgctcgccgccactgacgcttttttgggtggcggtgaccagtgccgtggcggatctgactgccatttcataggcccgcaccttggctgcgccgctggtgttgaggttgaattgcttgcgcaactccaccaacgtggcagcggtttgcgcgtccagctcgtattgggcctgggacagttggttggccgcctgacgggtggaggccgagaccgagccaccggcaaacagcggcaggctgacctggatgccgacgctgttggtgtcgtacttctggttgtagctgctttctgaatcggaatgggtcttgcggctggtggcgtacaggctgaccttgggcaaatgcccggcgcgcttgcgctccacttcataagaggccacgtcgagcgcgtggtgctgggacttgagttcagggttgttggccatggccagttcacgccaggtttcgaatcggttgggctcaagcggcgcgatctcgaatgggcgcgccaggggcgccagttcttcgatttgcagcggctggccaacaatggcttccaactcacgcaaggcactgtcctgggcatccacggcttcgatctcttcggcctgggccaggctcagtcgcgcctgggtttcgagcacatcggtacgcgtgccttcaccgcctttgagcaagcggtcattgagttgcaggcgctcggcaaacgctcgtttctgggcacggctcaattcgatgcgctcttgtgccagcaatgcctggctgtaggcgcccagcacccgcacggccagctcctggctcttgccgcgaaaacgctcatcggccatcaacgcctgggcggtgccttggcgaaaacgcgcataggcttcgtaatcgagcagcggttgctgcaaggtcagggccgaggcgtagctgcggtaattgcggtcgctggtaacgttacccagcgccgtgctctgggtgacttcggactcattgcgcgagttgttgtagctccatgacaggttcggcagcaatgccgcccgcccgatcacgcggttttcttgcccggcctcccgctcctgaatcgccgcttgaaaggttggatcgttgcgcagcgccaagtcatacacatccaacaaccccagggcgtgcgccgccggtgtacagcttaaacagagggtgaacaacaacgccttcattcttccaccagggccatatgggtgcgatccagcaagggtttgaacaggtagttgagcatcgaacgctcaccggtcttgacgaaggtttccactggcatgcccgggcggatctgcacgccgtgcagttgctgcatgcccgccgcactgacctgggcccgtagcgtgtaatacggttcatcggtgcgctcatcgacctggcgatcggccgagaccaaggtgacttcgcccgccacccgtggcgtagtggactggttgaacgccgagaacatcaattcaaccggcaagcctgggtgcaccttgtcgatcatctgcaccggcacccgtgcttccaccagcagtggctcgccttcgggcacgatgtccatcagcgtctggccgggttgaatcaccccgccttcggtgtacacctgcagccccaccaccacgccggacgccggtgcgcggaccaggctgttggcaagttcgaattcggcagaggccaggcgattgcgcaagtcgtcgctgcgggtgcgggtctcggccaactggctgcgcaggtccttctgaaaatcttcacccaactgacggatgcgcaggcgcagttccagtacctggcgctgcaactggccgatacggccaaaatcctcagcgatggcaccgtcgatttgcgcgtacagccgctcgctgtcgagcaggcgattgcgcgggatataaccctcacgcgccaactcgcgcagcccctgaagctgctcattcaacgccgcgcgctgcaaaaccttgcttgcctgggaggcccgcgtgccgcgcaactgcgcttcaaagccagcgatagtttcacgcaggcccgcctgttcggtagccagtgcctgggcacggctgttgaatagctggcgttgcaggctcagggtgttcgcggcgtcgggatcggccagcagctcggggctaaacacaatggtctgcaagccttcactctcggcactcaagcgcgcttcgctggccagcgacgccaggtattggctgcgcaatgactgcatctgcccgcgcaacggggtttgcttcaaacgcaacagcacctggcccgcgctgacccggtcaccgtcacgcacctggatacgctcgatgatcccgcccgccgggtgctgcaccgtcttgcgatgccccgacaccatgaccttgcccggcaccgccacgcccttgtccagcggagccaatgccgcccagccgaggaacccggcaaagccgccgagcaccagccaccaacccaggcgtgagtattttttgtcatccagcgccagcacgttagacgggtcactgagcaaaatgggcttgctctggctcatgcgggttttcctgcaccgaggcggtagctcatgctcatggtcgagaccggtttgtttgccgcagttttttgccgcgcctccagcactcgcgccgtggggccgaaggcctgcatctggccgtccttgaggatcagcaactggtcggtgaggctcagcacgttgggtttgtgggtaatcaggatcaaggtgcggcgctgctgcttgagctgggcaatggcctgcaacaacgcctgttcgcccacttcgtcgaggttggcgttcggttcgtccagcacgatcagtgccggtaacccatacagcgcacgcgccagggccacccgttgcttttgcccgccggacaagcccgcgccgccctcccccagttgcgtgtcgtagccctggggcagttgcaggatcaactcatgcacgccagccatctgcgcggcggcgaggacggtatcggcctccaccgcttcaaaacgcgcgatgttctgcgcgatgctgccggcgaataactggatgtcctgaggcaggtaaccgatatgcgggccgagttgttgcttgtcccacagggccaggtcggcgccatcaaggcgcaccttgccggccaagggtgcccaggcccccaccagcaccctggccagggtggacttgccgcaccccgacgggccgataacaccgagtacatcccccgccggcaggctgaaacccaggtttgccaacgccggacgtcggctgccgggcgcgcaggcgctgatctgctccacgctcacctggcccttgggcacgggcaggctcatgcgcaccggccgcgccgggttgtcctgcagcatcagcgacaagcgctcataggccaggcgcgccgaaccccattgtttccacacgccgatcaactggtcgatggggctgagcacacgtcccatcaggatcgagccggcaatcatcatccccggggtgatatcgccctgcaccgccagccatgcgcccaagcccagcaccagtgattgcagagccaggcgcacgcccttggaccacgcggtgaccatcgcggtcttttcactcgccaggttctgctgcaccagaaacgcctgatgctggctgaaccaacggccgcgcaaggtagcgagcatgcccatggcttcaatggtgtcggcattgcgcaggttggccgtggcctgctggctggcgctgatcgacagttggctggccagggccatcggtgcctggctgacataatgattagcccaggccaatgcgatcagaagcaacgccccacccaatgccagcaggcccagccaggggtggaacaggaagatcaccagcaggtacaccggaaaccacggcgcatcgaaaaaggcgaacaacgcctggccggtggcgaactggcgcaaggtggtcaggtcgtgcagggcctggcccgccgcttgggtgccacccttgagttgggcttcataggcggcgtcgaatacacgctggttcaagcacatgtccatctgcgtgccgaggcgaatcaccacctggctgcgcacccactccagcgcgcccatcaagccgaagaggccgaggatcatcagcgtcagcatcagcagggtcatctggttgcccgaggccaatacgcggtcgtacacctgcaacatgtacagcgccggggccagcatcagcaggttgatcaccgccgagaacaggccaatgttaaagaaggcgcttttataggcggtgagtgcagccagcatctcattcgcgcgcttggcaccgggccgagtcatgaagggcatcccattgaagagtcaagcaagggcccgcccggtgcgttgacagcacctgtggcgcgcccacagaatttgcagccgccgccgccctggcctgcaagcactcgggcggcgacggtgttcgagcaaggccgatgaaagagcgatctttcatcggcttttttgcatcaggcggccagggcgaagtcgtgcggcgcgtcctgaatacccaccagccccacatcggcagctgcaaatgcagcgggctcctgatgggccacaccggcagcggccagttgatcgaaggtggagttgaccgacaggcttgggtcgatgcccttgagcagggtgtcgatggccgaggccagcgccgaactgtcgccactcatcaggccgtacacgattttgtgcacctggccatcgcggccttcggattgcaggctcgacaggcccaggttggtgaagctgacttcctggttggcgatggtgtagccaccgctgctcgcgccgccggcgagggtatcgcccagggtcaggccgtcgagcgaaccccacagcgtgtgggtcggcggattgaacagggtgtaatgcaggctgccttcagccaccaccgccgcatcgctgacgctgcttgtcacgccatattgggtgccgtcgaacggccccgggttgaaaccaccggtgttcacaccctctttcaccgaaccttcacggtggttgagatcaccaaagtaagccgaccagtcgttcaggtattgggcgacggtgctggcggcgtaggtcgtgctgtatgaaatagaaatgctcatgcaaaactccaagtcattgggtggtcactccccagcaagccggtgcctgctgtggttttgcccgtcacagggcaaaagcggtcagaactgatattcaacggtgccctgcacggtgcgcccacggcccagggtgaaggccagcacatccccgagcggcaccaggtaggcgcggtcggtgacgttttccatggccaggcgcagggtcaattggtcggtggcgcggtagctgccatacaggtcgtagacggtgtagggcttccagtcagcggggtagacgccggtttgcgaggtggttaccccggcggcgcccttgacgtagtagccggcgctgtagcgggcacgcacacccacgtccagcttgcgctcaaagaaccgcgcgcccagcgtggcggtgccgcggtccatgggcatgtgttcggaggagccgaggatcgcgctgcaacccacgccggcattggctgcgtcgtccggcaccatcgcgtccaccggggcacggttacccgggcgtttctgggtcttggtcacgccacccagccacgcggttttgctgcagaactgattgctgccaagcatgcgcgtgtagttgaactggccgtaggcaaaaccggcgtcgtaatcgagttggtattcaagcccccgaaaacgcgtggtctccaggttgttcacataggccgcactgccgatattgacgttgccataacccggcggctgcacgcccagggccatataggaaaagtcatcgacccgggtgttgaagtaggacaccttcatgcccatgcgatcatcggaaaacagcaggtcttccttgagcacattgaagccgacttcccacgccgtggaccgctccggcttcaggtaagggttggggaaaatcgactccgaaccgccgccgtggggccggccgctgaccatggtttcggtcactgccggcgggcgccaacccttgccataggtggcgaagagttgcagccagtccacacccggcttgaccgacaagccaaacgtcggcgaaaaacggccctcctcgcgatccacatcataagtggtgggcacactgatctggcgagtggtgccgatgatgaaggtacgggtgttcaaaccggtatcgccgcgcagccgataacggtcataacgcaagccggcgttaaggttcagccaaccgtcgtagtcgaagtccaggcgcccgaacaggctgcccatggcgcgatcacctttgggcgtgatgctctccgccgccgaggccgtcagcgccgagcccgcctctaccccctggttggagtccggccggaccttgtcgtagaaaaactccaacccataattggccttgagggtggccagttccgtcagggcaaaggtcgagatgttctgcgcctgcgcgccgtaggtattggtttgataggtgacgtcgtacgccttgctgataccccgggccagggtggattggtcgttgcgggtatctacatggtagagcttggccttgaagtcgatcagcgggttgtctggcgcatagctgtaatcgagcgcgaagttctgcgccttgacgttgctgctgccgagcttttcccataactggggcttttcggcggtcatcatattgacgtcgtcgtagtcgacctcggtgaccaggtagctcagttgcaggcgctgctcaaccggaagattgagccccagcttgagcaagcgtgaacgcatcaccgagcccgaataggcaacggtggtgttcttgatccgctcctcactggccggcatgtacgccgcgccgctacgcaactcgccaatgctgccccgggtgccggggttgtagtcgccgaggtgacgctcgctggcggccaccagcatgtcccagacatcggtgcccacggcaaacgccgaactgccgataaagtgcgtgccgttgctgcgcccacccagccccgaggtgagccgaatgcgcccgccgatttgcttgccatccttgagcaggtcagcggcttccagggtgcggaaattggccaccccgccaatcacccccgcaccgccctgggtggaggtcgcgcccttttcgatcaccacctcggacagcaactccgggtcgacatacagcgtgccattgcgttgctggtgaccactttgctggtaattctggcgcatgccatcgaccgacatattgacccggccatagtcctggataccgcggatattcaccgacaaccctgggtcttgctggctgacggcggagtagacgcccggcgcctcttccagcatctcggcggcatgacgcggcgggttgcgatccagctgttcgcgccccaccacactcaccgcgcgcggcgttgaatacacccaatcctgcgggtgcaggccggtgaccgtggtggtggccaaggccagggcaccggcttgttgttccacccgagtcagggtgacctggcgatcgccggtaaagcgatactccaccggggcggcacccagcaggcggcccaagccttcctgcacgtcaaagcgccccttgagcgcggtgctgctcagcccgtgcaggcgctggctgtcgaacaacacttgcaggccggcctggtcagcgaaggccagcaccgcactgccgagggattgcgcagggatatcgaacgtcaacacggcggactgagccgtggcagctggaggctgcgcataggccggtacggccacggcggacaaccccaggtgaatggccagggctaagcggctgccggtggtacgccccttggtgagtgctgacattggtggtgatccctgcgctgagcattttttgtttatgcgaatacttctcacctagcaagacgtgcgaggcgcgggaagtcagtaatattttttgcaggagcgagcttgctcgcgaagaacgtcaacgaaaacgcggtgccctgggtattttcgcgagcgagctcgcgcctacaggggcatcggtttttaacgggggaaggtcagtagatcaggctgaggccagccagctccaggcgttgcacttgaagctcttgggtcagggtggccagggcgctgtcgagcatgtccaggcggaagacgccgctgacttcgcgctcgcccaggtctgcgttggccaacaccacccgcccggggcggtaacggttgagttgctcgatgaccttggccagcggctgccggtcgaagatcaacacaccacggcgccaactggtggcgcgatccacatcaaactgatccaggctgaccaccccatcctgggggctgtagcgcgcagcctggcccggttgcaggacctgctcggcagggccgtttctgagtgacgccggcactgagacttcgacgctgtgttgcagcacaccgacccaggcctggctctcgcgttcacgttcgaccacaaaccgtgtgcccagcgcccgggtctggccgccggcactgtgcaccacgaacggtcgggtttcttcgccggccatcggtgccacctgaaaaatcgccgcgccctggagcaggctgacgccgcgctgtacgccgtcgtactcaaggcgaatggcgctatcggaatccagctccaccacgctgccatcggccaggtgcaccgtgcgcacttcgcctttgtgggtgacgtagtcggcctgcaagcgcagcaaggcatccggcccgcgtacccagccgatgcccgccgccaccagcaccagcgccacggcggccgcacgttgccacggccttcgacgtttggcgcggcgcaagggtatagcgggcgcgggcgggcgctgtcggtgtacagcctcgtccgtgtgcacctcgcccagcgccgcccaggtctgctcggcaaaccgcagggccgcttcgtggcggctgtcgcgggcgatccactggcgcagttcggcttgttcctgttcgctcaaggcaccggcgtgcaggcgcaccgcccactcggcggccgcctcggtaatgctgtgctgttgcggtccctggctattcacgtgtgaatctcgaattctcgttatatagacgctgtgacgtctggcctggcgtttttcggtaattcattcgtcggatggcgtcacctcgccttcctgcaagcgctgcatcacataggccagggccttggccagatgcttttgcacgctgctgtcgctgatgtccagatgccgggcgacctgagcgtgggtcatgccttcgatacggttcaagcggaaaatctgctgggtgcgcgccggcaattccgaaagcgcctgcttcaatgcctgccgctgttgctgcgccattgcctgagcctccaacccggccacgtcatcttcaatctcggccagcgcctcgtggggcacggtgtcggtcttgcgccgtgcttcctggcgaatatggtcgatcagcagattgctcgccgttcgatagagataaccctgggagttgtcgatacgctcaccggccggtttttctgccaggcgcaggaagctctcctgcaccaggtctgcggccaattgcgggtcccgtactctgcgggccagatacccgcgcagcgtatcggcgtgcttgagaaacaggcccttgagatccacgtccgacaaaccgactccctggaatgttgaggaaacaggcgggcatcttaagcgttgtcgagaatgattttcaattgatatctaatccgattgagcctagcgtttgccttgattaaacgttcgatcaccgaacagatccgcagccatccattgaccaaattaaccaaccagtacattttgactccacaaccaataagaactgtggagaagcctctatgccgcccatcgtgctggtgctcaacggccccaacctcaacctgctcggcacccgcgagcctgccacttatggccatgaaaccctggccgacattgccgccctgtgtgggcgcagcgccgacaaactcgggctgaccatcgaatttcgccagaccaaccacgagggcgaattgctcgactggatccacgccgcccgcaaccgctgcgccggtatcgtgatcaacccggcggcctggacccacacctcggtcgcgatccgcgatgccctggtggccagtgaagtgccggtgatcgaagtgcatttatccaacgtgcacgcccgtgaagcctttcgtcatcactcgtttgtgtcgccaatcgccaaggccgtgttggccgggtttggcagccatggctaccacctggccctggaacatttcagccatacgctgaagggacgcacctgatgaaaccacgcattctcgccggcctgatcggagccggtatccaggcctcacgcaccccggcactgcacgaacaggaaggcgacgcccagggcttgcgctacctgtatcgcctgatcgacctggagccgctgcatctggacctcagcgccctgccggaactcctgcgggccgccgagctgatgcacttcactgggctgaacattacctacccgtgcaagcaggcgatcctgccgctgctcgatgaactctccgatgaggcccggggcattggcgcggtcaataccgtggtgttcaaggacggcaagcgcatcggccataacaccgactgcctggggttcgccgaaggttttcgacgcaacttgcacaacgtgccacgccaccgcgtggtacagatgggtaccggtggcgcgggtgcggcggtggcccatgcactgctggccgagggtgtggagcaactgagcctcttcgacgtcgacagcgcccgtgcccaggacctggtggataacctcaccgagcatttcggcatcggtcgcgctcaggttggcagccacttggaaaacgccatggccgaggccgatggcctggtgaacaccacgccgatgggcatggccaagttgcctggcacgccggtgccagcgcagttattgcgggccgaattgtgggtagcggaaatcgtgtacttcccactggaaacccaactgctgcgtgacgctcgcgccttgggttgccgtaccctggacggcggcaatatggcggtgtttcaggcggtgaaggcgtttgagttgttcagcggcgaagtggcggatgcaaacaggatgctggcgcatttccagagcatgaatacctagggatgcaaccccatcatgatcgttcccacgctctgcgtggaaacgcctcccgtgacgctccgcgtcacgactttgacagcagacgcagagcgtccatgtcggcattcccacgcagagcgtgggaacgatcagttctcaggcttgcaggtagcgcaacaccgactcgcaaatcatctcccgatggcgctgcttgatcgcctcatccgacagctcgatctggaaaatctcgctgaaggtgtgccggttggacacccgataaaagctgaacgagttgatcagcaagtgcacatccagcggctccagcccttcgcgaaacagccccaactcagccccgcggcgcaaggtctcccccagcccttcgaggattttgctgttcatcgccttgatggtctcggtgcgcttgacgtactcggcgttgtggatattttcgatgctgacgatgcgcacgaaatccacgttctggtcgtggtgatcgaaggtgaactccaccaaccggcgaatcgcctcacgcggctccagagccgtgaggttcatgcgcgtttcggtgttgcggatatcgccgtagagcttctccagcacctcgacgtatagctgctccttgctgccgaagtagtaatagatcatgcgcttggaggtatggatgcgctcggcgatggcgtccacgcgtgcgccggccaggccctgctgaacaaactcgacaatagcttcttgcagaatattttcgcgggtcttttccggattgttcttgcgactcttgcgcggtgtgtctgacacagcgcagaggtcaggggtcagggtcatgttgcgctcacggcgattgcttgggcaggcccgattatgggccgaggcgctccccgaaggaagcacccgccctgcccttataaacgggcctggcgcgccgcaccgctgcgtgacttggccatcgccgccagacgcaccgccacgttggctgcgccgtagccggcatagccgtgcttacgctggatgatctcgaagaaaaaccgcccttcgaacggttcggtgtacacatgaaacagctcaccgccctgggcgtcgcggtcgtacagcacgttgtagtacgccagctcgctgaggaactcatcgtcaaaatcgaagcgcgccgccaggtcgtcgtagtagttgagtgggatatccagcagcggcacaccggcttccttggcccggcgtacttcagcaaaaatgtccgcgcaatcaaacgcaatatggtgcacgcccgaaccgcgatagctggagagcgcgtgggaaatcgcggtgttgcggttttcggagatattcagcggcaggcggatcgagctgcaacggctgcgcaacgcccggcttttcaccaggccgtaagggtcgggcagcaccacttcgtcatcggcttcgaaatccagcaggcttttgtagaacaacacccaactgtcgaggctgtcggccggcagcgccatggccatatggtcgatgcgcagcaagccgccgctggcgagtgcggccgtttgcaggttgaaatcggtgtcgtaaagcccgccttcgctgggatcgaccaggtaaatcaggctgccatccggcgcccgcacggcggccaattccagctcgttggggccgaccaggccgcggtaaggctggcctttataagccaccgcccgctccagggccttggcactgtccttgacccgcaccgccgtggcacacaacgacgggccatgggcctcgaaaaagttatgggcaaaggaatagggttcgcagttgaggatcaggttgatatcgccctggcgcaacaggctcacattcttcgagcgatgctggccggccttggcgaaacccaggcgctccagccaattgctcagcttggcaccgaggctttcatccacggcaaactccaggaactcgataccgtcgtactcgctggccgccggggtttcaaacagaatgtccactggcgcagcgggcgcttcttgcgccaggcgctggcgggttttctcttccaggtacagcaacgagcgcaagccatccgccgcattcgcgcgggtgggcgcggcgcggaaaccatcgttgaaaatttccagggacaagggcccgctgtagccacttttgatgatcggcgcaagaaagcccgccaggtcaaattcgccctggcctgggaagcaacggaaatgccggctccactccagcacatccatggccaggatcggcgcgtcggccatctgcacgaagaaaatcttgtcgcccgggatctgggcgatggcactcgggtcgcccttgagcgacaaggtgtggaagctgtcgagcaacacaccgaggcttgggtggtcgacttggcgcaccaggttccacacctgctgccaggtgttcacatgcttgccccaggccagggcttcatagccgatgcgcaggccgcgcttgcccgcgtgttcggccagcaggctcaggtcatcgagcagaatacgttcgtcgcccacgctgtcggccgaggcgttactgcacaccagcaccaggtcggtgcctagctcttgcatcaaatcgaatttgcgttcggcgcgctccaggttgcgcgccaggcgatcgcggcggcagccttcgaaatcgcgaaacggctggaacagagtgatggcgatgcccaggtcggcgcacatctgcctaacctcgcgcgggctgccgtcgtaatacaacaagtcgttctcaaagatctccaccccatcaaacccggcggcggcaatggcttcgagtttttccggcagggtgccgctcaaggacacagtggcaatagaacgttgcatggaagactcccggcaattgttgtttgtggcaaattattcgcccccagcctacaggcagcaattaaaatgtacgaaccggttagtttttggtgcgattatcgaacactaagcccctttggcgaattgacgactttttaaccactgcgcaccatcgaccgggcaattcgttcacgtaacaaagacccagaacacaccataagaatttcaaaaaacgggtacaaacctcatgcctctgcaaaatccagccctggccgcgcgcccgggcaacccgcacgccggtatcggcgacaagatccgcggtgccctggccgtgggtaaaacgcgctggggcatgctggccctggtgttcttcgccaccaccttgaactacatcgaccgcgccgccctgggcgtgatgcaaccgatcctcgccaaggaaatgagctggacggcgatggactacgccaacatcaacttctggttccaggtcggctacgccatcggctttgtgctgcaaggccgcctgatcgaccgggttggcgtcaagcgcgtgttcttctgcgccgtgctgctgtggagcctagccaccggcgcccatggcctggccacttcggcagtcggctttatggtctgccggtttattctcgggctgaccgaagccgccaactacccggcctgcgtcaagaccacacgcttgtggttcccagcgggtgaacgtgcagtggccaccggcatcttcaacgctggcaccaacgtcggcgcaatgatgacgccgatgctgctgccgttgatcctgcacgtgtggggctggcaggcggcgttcctgtgcatgtcggcacttggcggtatttggctggtgctctggggcttgaagtactacaacccggaagaccaccccaccgttaaacaatccgaattggactacgtgcaacaggaagtcgaaccggaacaaccccgtgtgccgttcagccgcatcctgcgcatgcgtggcacctgggccttcgccctcgcctactcgctcaccgcgccggtgttctggttctacctgtattggctgccgccgttcttgaaccagcaatacaacctgggcatcaacgtgacgcagatgggcattccgctgatcatcatttacctcaccgccgactttggcagcgtgggcggtgggatcctgtcgtcgttcctgattggccgtggcatgaattcgatcaaggcgcggctgttgtcgatgctgctgttcgcctgctgcatcgtcggcgtgatcatggcggccggctccagccagctgtgggtcgcggtgtttgccatctccctggccatcggcgcgcaccaggcctggaccgccaacatctggagcctggtgatggactacacgcccaagcacatgatgagcacggtattcggctttggcggcatgtgcgcggccatcggcggcatgttcatgacccagatcgtcggccacatcctcacggtgaccaacaacaactacacgatcttgttcaccctgatcccggcgatgtacttcatcgccctggtgtggatgtacttcatggcgccgcgcaagatccccaccgtagacgtttaactaacgccgccgctgctgccaggcagcggccaacccgctcatgcagatcaccccgatacccaccaccgtggtcatatcgggggtatggctgaacaccagccagcccaacaaccccgcgaacacgatctggcaatagccaaacggcgccagcaaggccggcgccgcgaagcggaacgcctgggtgagcatcaagtgcgcggtcatcccgcaggtgcccagcgccagcatcatcaccgcatgccacagcgtcggcacttgccagaagaacggcaccattgcactcatcaccagggtgttgcacaggccggcgaagaaattgctggtggtcgggctgtcgtattggctgaggatgcgcgtgagcaactggtagaaacagaagaacaacgccgagcacagcggcagcaataccgccggggtaaacaactcgccgccggggtggatgatgatcaccacgccgataaacccgcagatcaccgccagccactggccacgggtcacgtgctcacccagcaacggtaccgacagcgccgtcaccaggatcggcgccaggaagttcaccgccgtggcttcggccaaggggatgtaatgcagcgccgtggtgaagaacaggctggtgcccaacaggcataacgcccgcaccacctgcatgcccggccgcttgctgcgcaacacgcgcaggcccgattgcggcaggaagatcccggccatcagcaaggtgtgcaccatgtaacgcgcccacaccaccatcacgatcgggtaaaacccggccaggtatttggacaaggcgtcgtggctggagaacagaaacgtcgccagcacaatcagcaggatgcctttgaacggatggttgacgccggagagcggggtactgacagtcattgaattctcttgtgtggcgagcgggacgctgagcactgaaccaagtagcgctcaacccggtaatctagcagccgggccggagtctgccccaagagcataaccaaacaccgggcgaacagcgcactaaatcgatggatccgagtccaacgctgcacgctcgccccggcgttgcacactttttaaccaaggccttgccgctatgaaaaaaatcctctttgccctgtctgccctcgccctgctcgctgcctgcgataaagccccgaaagaagcccccaagcccgcgcccgcttccgtgcaagcgaccctggtgcccgagaccccgcccaccgataaatgggtcggcaagtggatcggtgtcgaaggcttgcacctgaccatcgccaaagacgacagcattggccgcggccactatctgctgaccatgcaatacggcctcgacgccgatgacaccggtacgttcaaaggtgaggccactgacgacggcatcgccttcacccgccccgacggcccgcagctgttgcgcgctggcgatggcgccgccaccggtttgaagtggctggcagataaaaaagactgcctggtcgttgccactggcgaaggctattgccgttaataccgaccataatcaatcacggttagcacacagaggattgctcccatgctatggaaaaaaggccgacgcagcgacaacgtggtggatgcccgtaatgacagtggcggcggcggtggcggtatgcgcttcggcggcggcaagggcctgagcctcacggccatcgtgctgatcgtcggcattggctggctgaccggccaggacccgatgcagatcctcggccaattgaccgggcagatggagcaggcgccgtcggtcagcactcagccgcgtcaggcaccgccggccaacgatgagcaagccgactttgtgcgcgctgtgctgggcgataccgaagacacttggggccaagtgttccagcaaaatgggctggcgtataagaacccgaaactgatcctgttccgtggccgggtaaattcagcctgtggtggcgccacctcagccagcggcccgttctactgcccggctgaccagcaggtgtacctggacctggacttcttccgggaaatgtcgcaacgcttccaggccgccggtgacttcgcccaggcttacgtgatcgcccacgaaatcgggcaccacgtacaaacgttgctgggcatctcgtccaagatccaggcggcgcgccaacagggtcggcagatggaaggcgacggtggcctgctggttcgccaggaactgcaagccgactgctttgccggcgtgtgggccaaccatgcgcaaaagcgcctgaactggctggaacccggcgatatcgaagaagccctgaacgcagccaatgccatcggcgacgaccgtttgcagcagcagggccaggggcgcgtggtaccggactcctttacccacggcacctcggcccaacgcgtgcgctggttcaagaccggcttcgcccagggccagatcactcaatgcgataccttcgcggccaagagtctctaaatgatcaaacgattggggttactgctgggtgtgctcgtgtcctgttgcaccttcgcggccgaacacggcgtcaaggtggtcagccccgatcgctttcatctggaggccggcgaactcagcctgggcctgagccaggattggcgccaaccgctgcccaaggtcacacgtgcattgatcatcgtgcatgggcgcctgcgtaatgcgcaaacctacctgcacagcggcatcaatgccgccgagcatgccggggtgggcggcagtacgctggtgatcgcaccgcagtttctcaatcaaacggacgtgaagcgtaaccacctggacgatcaggttttgcgctggaagggcaacgactggatggccggcgaagcgtccaccggcccagggcagatcagctcttatggcgctctggaccagatcatcaagcacttgggcaaccgcaaactgttcccggcgctgaaagaaatcgtggtcgccgggcattccggtggcggccaagtggtgcagcgcttcgccctcaccggccacgaccacccgctgctgaacaccgaaggcatccgcctgcggtatgtggtggctaacccgtcgtcctatgcgtatttcagcccgcaacgcccggtgaagttcgatgcgaccagttgcccaggcttcaacgactggaagtacggcatgcaaaacctgccggattacgtgggtgaccgaggcgcccagcaactggaacaggcctacgtgtcacgggatatcacttacctgctgggccagcaggacaccgaccccaaccacccggcgctggataaaagctgcgaggccgaggcccagggcgcgtatcggctgatacgtgggcacaactactttgattacctcaagcagcggcatccgcagttgggtcacaggctggtggaagtgccgggggtggggcatgacggggacaagatgtttacctcgccagagggagaaaaggtgctgtttgcccagtagcgcctgaaggaaacccaatcaaaatgtgggagctggcttgcctgcgatagcggtgggtcagctgacactttatcaactgacagtccgtcatcgtaggcaagccagctcccacatttgatctctgtcgcctgggttagatcattcggcgcagcgccgcacaatcctcggcatgccaatccgccaactccggccacgggttctccggcaagttcaccaacaccgtcttggcccccgctgcccgaccacaatccaggtcaaagcgataatcccccaccatcaccatttcgttgggtgatatgtcccaagccgccgccagcttcagtaacccacccggatccggcttgtgcggcgcatcatcgcgccccagcacatcctcaatggcaaagcagtccgccaggcctatcgcctccagggtgatatgggccagctcccgcgcattgcgggtcaggatgcccaggcgataaccgcgagcggccaattcctgtaccagctccaccgcgccctgcgccgccaccgaacccagggccagctcgcgctcgtgctccagcaaccaggcgtgcttggccgctgcaaccggcgccggcaaggccgccagatgcgtgaggatgtcgtcttcgggtggaatgtccagcgcctcgcggatggcagcaaagtcatgcaccgccaccgtgagggtgccgtccatgtcgaacacccagtgcttaacgtcgcaaaggctcatgcccaatccttgcgatggcgaatcaaaccttcctgggtcaccgacgccaccagttgcccggcgcggttgtacacgctgccccgggagaaaccccgggagttgccggcccacgggctgtccatggcgtacagcaaccagtcatcggcacgcaggtcagcgtggaaccacagcgcgtgatcgaggctggcgacctgcatgtctttctgccacacggtcttgccatggggcagcagcgaggtggtcaacaggccaaagtccgaggcataggccagcaggtatttatgcagcgccggcgtgtccgccaacgcaccgtcggcacgaaaccacacgtacttgaccgggtcggatggctgggggttgaacgggtctttttcggtgaccgggcgcacttcgatgggcttggggcacagcagcttgtcgcgcatgtgctcggggatcaggtgcgcacgttgctgggtcagctccagctccgacggcaggttttccgggcctaccaccaccggcatggtggtctggtgctcgaaaccttcttcgtcgtactggaacgaggtcgtacaggtaaagatcggattgcccttttgaatcgcggtgacacgacgcgtgctgaaactgccaccatcgcgcacgcggtccaccgaatacaccaccggcaacgcggcatcgccagggcgcaggaaatagccgtgcagggaatgcacatgccgcgcttcttctacggtctggctggccgccgacaacgactggccgagcacttggccgccgaacagctggcgaaagcccaggtcctggctgcggccgcgaaagaggttttcctcgatcggctccagggtcagcaagtccaccagatcttccaatacttggctcattgaaactctcctcaaagcaaaacggtatctaccggtaggagcgagcttgctcgcgaaggtcgttaacgatgacgcagcgcttctggtttaccgcagcgctcttgcgttcttcgcgagcaagctcgctcctacaggtttctgttgagcatgaccgcctgcttatccgtgcagcgtgtccaaccattgggcgcgggtgatgcggtacaacacgtgagggcgcagcgggtcaccggctgcgactttcgggtgttcaaaatctgcctgcggatcgtaatgcataccgatggcctgcatgactttttgtgagggcagattgctctcggtggtgaaagccaggatttcgtccagttgcaggcggtcaaaaccacagcgcaacgccgtccaggcggcctcactggcataacccaggccccaatgctcacgggccaggcgccagccgatttccaccgccggggtaaagccggcttcgaagctgacattcgcaaggcccgtcaggccgataaactcaccggtgtccttgcgctgcaaggcccagaaaccaaagccatattcagcaaaatgcccgcgaatccggccgatcagcgcggcgctttccaagtggctcaattgagccgggaaataacgcatcacctgtgggtcggcgcacatgcgcgcaaagtccggcaggtcgctgtcgcgccattggcgcagcaccaagcgtgcactttccaattccaatatcggctccatgggtccccctgccttgccatgtgcgtgagtgtacagcgctgttaagatccgtcgcaggttcccgtcagaaaatcccatgcccttgccattgatctaccacgaagactacagccctgagttcccggcggaccaccggttccccatggacaagtttcgcctgttgcgtgaccacctggtggacagcggcctgaccgaagacagccaattgctgcgcccgccgctgtgcccggcggacattttggccctggcccatgaacctgggtatatcgaacgctacatgggcggcgaactgtcccgcgaagaccaacgccgcctcggcctgccctggagcgaagccctggcccggcgcacggtgcgcgcggtgggcggctcgatcctggccgccgaacaagccctggcacatggcctggcctgccatttggccggtggcacccaccatgcccattacgattatccggcgggtttctgcatttttaatgacctggcggtgatcagccattacctgttggccagcggccgggtcaatcgcgtgctgatcttcgattgcgacgtgcaccagggcgacggcaccgcacgcatcctgcacgacacgccggacgccatcaccgtgtcgctgcactgcgaaaagaacttcccggcacgcaaggcccagagcgactgggacatcccgctgcccatgggcatgggcgatgccgactacctcaaggtggtggatgacgcgctcaactacctgctgccgctctaccagccggacctggtgctgtacgacgccggcgtggatgtgcacaaggacgacgcccttggttacctcaagctgacagatgcaggcgtcgccgcccgtgatgaaagcgtgatgcgccactgcctgggccgcgacattccggtgatgggcgtgatcggcggcggttacagcaaggaccgccccgccctcgcccgccgccacggcatcctgcaccacagcgcacaacgggtgtggacgtcatcaggctgtcattgaagtgtgagcgttacccacaatgcctgtggaacggcctgtggataacttgagcgtaagcggctgcaagcgtttgagcgcatggcctgtaggaaagtgtacgttttttgatcaggcaacagcgtcgtggtcgggtagaatgctcggcctattcatatcaccgtagcctgcccatgcctcagacttctgcccaccacgtctccattatcggcggcggccccgccgggctgatggccgctgaagtcttgagcctggcgggcgtgcgcgtggacctgtacgacggcatgccgtcggtagggcgcaagttcctgctggccggcgtgggcggcatgaatatcacccactcagaagcgtacccggcgttcctgtcgcgctacgccgaacgcgccccgcacatggcgccgctgctgcgcagctttggcgccgaggcgttgtgcgaatggattcatggcctgggtatccagacctttgtcggcacctctggccgcgtatttcctaccgatatgaaagccgcgccactgttgcgcgcctggctcaaacgccttcgcgatcaaggtgtggttatccacacccggcatcgttggctgggttggaatgccgaaggcggtttacttatccacagcccggacggtgacaaagttgtccacagcgatgcggtgctgctagccctgggcggcggcagttggtcgcgcctgggttctgacggcgcgtggcttaacctgtttgaaggcaagggcctgccctatgtgcgactgcaaccgagcaactgcgggtttgaagtgtcggcctggagcgagttgatggtcagcaaattcgctggcgcaccgttgaaaaacgtcgccattggcctgggggatgacaagcctcggctgggcgaatgcgtgatcaccgccaccggcattgaaggcagtttgatttacgccttgtcggcgccgattcgcgaagcgatcaaccgcgacggtgcggccacggtgcatatcgatttgctgcccagcaagccgttggacaaggtgcaggccggattggcaaagccccgtggctcacggtcgatgagcaagcatctgcacagtcagttggggctagatggcgtgaaagcggccttgttacgcgagttgtcgcccgctgaacacttcaccgatccggcgcaattggcggtggatatcaaagcgttgccgctgacgctggtgaagacgcggccgatggatgaggcgatcagcacggcaggtggtgtgccgtttgaagcgctggatgagcggttgatgctcaagccattgcctggggtgttttgtgcgggggaaatgctggactgggaggcgcccactggtgggtatttgctgacggggtgttttgccagtggtagagcggctgggcgggggattttggaatggctccaccgctgatcgttcccacgctctgcgtggggatgccgccagggacgctctgcgtcccgctttaggttcgtgacgcagagcgtcacaggatgcgttcccacgcggagcgtaggaacgatcaatcacttcttcttacgcggcccagtattaaacaccggcaccttgcgcaccggcttgatcgacggctcagccggcgccacgtcaccactgtccacccacttgcccaggttgcgcttgccgccaccgccggacgccttaggcttcttcggttttttcggcttcttgaccacctgcccgctggcatcggtgtccggcacgcggtgctccggctcgaagtccggttccatcttgcgggtgagggtctggcgggtcagcatctcgatcgccgagagcatgttcacctcatcggcacacaccagggaaatcgcctcaccggtattgcccgcacgcccggtacggccgatgcggtggatgtagtcttcggccacgatcggcaggtcaaagttgaccaccagcggcaggtcttcgatatccaggccacgggccgccacatcggtggccaccaggatctgcacgtcgctggccttgaagcggtccagtgcgcgttggcgggtggcttggggtttgtcgccatggatgccgtcggcgttgatccccaggccctgcaacttgtccaccaaggcgtctacgccgttgcgggtcttggcgaacaccagcacttgcttccaacggcccttgcgcatcaggtgcacaaacagttccggcttgcgcttcttgtccaccggcaccacccactgcttgacggtgttggcagcgacgttgcgcgggctgacttcgatgctcagcgggtcgttgagcatctgcccggcgagcaggcggatgtcatcggagaaggtcgcggagaacagcagggtctggcgctttttcggcaacatgcggtagatgttggcaagttcttcggagaagcccaggtcgagcatacggtcggcttcatccagcaccaaggtttgcagctggttgagcttcagcgcgttctggcggaacaggtcgatcaggcggccaggggtggcgaccagaatgtcgacgcctttgcgcagcttcatcatctgcgggttgatgctcacgccgccgtacaccgcgtaagtggtcagcggcagatgttgggcgtactcggcaacgctggcgtgtacttgctcggccagttcgcgagtcgggcacaggatcagcgcacgcgcagagttggcggcgactttcggcccttccagggtcaacagttgcagcagcggcaaagcgaaacctgcggtcttgccggtgccggtctgggccgcggccatcaggtcgcgaccggccagcacggccggaatggcttgggcctgcaccggcgtcggggtctggtagccaagcgtctcaagggcgcgcagcaagggttcgatcaggccaagggtggcgaaagtcatgtagttaccgtaggaaaaattcagcgcaagggcgtaatgcgcggcagtttaccttatttcgggtttgggcttgcgccattggggcaggctgatcagcaacaccgcgctgatgatcaccagcattgccagggcttcttccaggccgatgctctcgcccacgaatacaatccccagcaacacggccactgccgggttcacataggcatagctggtcgccgccgccgggcgtacgtgcttgagcaggtacatataagcgttgaaggcaatgatcgagccgaacaccgtgaggtacgccagggccagccagccttccagcggcggcatggcctgcaggtgctcgccagacaacgcgctgacgatcagcagcgccacaccggccacgagcatttccgcggcactggccatggcgccttggggcagcggcaaatgccggctccacaccgagccgaaggcccaggacgccgccgccatcaacagcaacaccgcgcccagtgggctcgactgcaaggtactgcccatgttgagcatggcaatgccgatgatccccagcagcaccccggcccattccaaccgcgtattacgtgcgccccagaaaaacccacacagcaaggtaaacagcggcaccgtcgccaccgccagcgcggccacgccggacgacacgcccatatgttccgccacgctgacgccaccattgcccacggtgagcagcaaaatgccgatcatcccggccgccttccactgcggccaggtcggcgccggcaccccgcgccacctgagaaagccgtacatcaacgcgcccgccgtgcaaaaccgaatgcccgccagcaacaacggcggccagtactccacgccaatgcggatcaccaggtaggtggaaccccagatcacatacaacgcaaaaaaggcggcgatcaacggtaagggaaagcgacgtgggccaggcattgggcggctctatggcaggaaatgggagacttattctagaaacgaaggtggataaacttaagttacaaaacctgtttaaaacgccgatacacttctcaaaccatggttatcaaggctataacccgtgctttcgaaagcgatgcgcaaccggagccttatcatggacaaatacgaccgcatgctcctcagcgccctgcttgaagatggccgcgcttcctacgcgcaactggcacgcaccgtaaacctctccgcccccgccgtggccgaacgcgtggccaagcttgaggccagcggcgtgatcaccgggtaccaggccaaggtggatttatccaaggtgggcttgccgattcaatgcgtgatcgagttgcggctgaccaatcatggcagccaaaaggtgtacgacgccctggcggaaatacccgaactgaccgaatgccaccgcgtcacaggcgacccctgcgtgatcatgcaagcggcggtgggcaccatgccgcagctggaagacctgattaatcgggtggcgaagttcgggttcagcaagacctcgattattttgtccagcgccatagagcggcgggtgccgttggggcagttggacaccaatgggaaaagtgctggctgagcgatcgccattgctgatcgttcccacgctctgcgtgggaatgccgccctggacgctctgcgtccgctcttaaagtcgtgacgcggagcgtcaccagatgcatgcccacgcagagcgtggggacgatcagcgcctggccttaaaacccgcgatgtttcttcaggtgttcattgatcttcgccgccggcactttctgcaaggtgcacaacaggtcatgggacagctcgcgcaaaccatgagtctggcgcagttcctgggccaggtgcgcggtgaggttagcggccatttccgcgtccgccagcgcccggtgagcctggccggtgtggggcagtttggcgtaggcgttgagggtgccgagcttgtggttgggcgcagccggcatgaggcggcgggccaggagcagggagcaggcgaacttttgcaggcgggtgcggcggatcaggccgagctcaaagtcccagaacttctggtcgaacgcggcgttgtgcgccatcaagggcgtggtgccgacgaactcattgacctcgttcatcacccgctcagccgggggcgcgctgcgcagcatggcgttgctgatgccggtgagttgttcgataaacgccggtatgcgcacgccagcgttcatcaggctctggtagcggtccacgatttgcccgcgctcaaggatgaccacgccaatctccgtggcccggcagtggctgctgggggtgatgccggtggtttcaaagtcgatgaccgctatgcgttccaaacctgttcctactccgttcaacgatctatttgagcaacaacgcgccttcgatcggcacatagtggctggcggcgcgtatcaatgagttggccgtcagccccggcacgccgtaggccacggcccgcacgccatgcttgtggatgatgcgctcgagcagcatgtcgaaatcaccgtcaccggaggccagcacgacttcgtcgacatgatcggcggcgtccatgatgtccagggtgatgcccacgtcccagtcgcccttggccgagccatcgctgcgctggatatacggcttgagttttaccgtgaaccccaggttgcgcaggatctgctggaactgctgctgcttgctgtcgccgcggtcgatggcataggcgtacgcctcgacaatctgcccgcgcgcgctgatgtcagcccacagggcggcgtagttgaagtggcaaccataggcctggcgcacggtgtagtagaggttttgcacatcggcgaacactgcaatttttttcaccgcacttcctcatggacagccaggcgccagcgcccggaaagggcgccagtatgccagccaagggagcgtttccgggaaaaaatcagaccggagcgccgtggcgccccgggcctggtgtgtcagacgaaagaatcgtcgtcgccaaaggatgaggaatcgtccgaaaaatcgctgtcggcattgttgccgccccagctgtcattaccggcgaactgctggtcatcgttaccccagttgccttgatcgctggcaggtgctggttgttcgatgatctcttccaccacctgtggctgctggttgtgatggaacaggctgctgatcccttcggccagcaacaccccaccggccacgccggcggcggtcttcatggcgccaccgaggaaaccactgccggctggtgcggcgaccggtgcttgcggtggctggtagttctgttgcggcgcaggctggccaaaagcgggccgcgcgggctcacgccagccgccacctgagttgctcggcgccggctgtgggtcacgggagctgccgccaaagatgctcgacaggaacccaccaccgctggccggcgcaggttgcgtggccttggcccgttgcagctcgtcctgcaattgctggatctgctgggcctgttgcttgttctgcgcgtcgaggctctgcagcgcatgttcctgcaccagaatcgactgggtcatgtagtagccgacggcgggttggcgagccatatgctccttgatccgcgcttcggcctgggcgtcgcggggggctgagtccgtttcggcttgctgcaaccgtgaaaacagtccatcgatcagggtttgctcttcgctgttcatggcgacctcgtagattgccgataaaaaattctcgtcccgcctgtgatcaggccaggggcgtttcagttatggggatgttacgagttgtttcaatggtctttactcaaggtttacgtttgcgccccttggaccctgatcggttaaagtgtcgccctctgcttccaggcctgtgatgaccctgatgaatccgttagacgttttgcgcgactccttccgctttacccagcgcaacctgggcgccatcgtccagctgtgcctgccgttggtgatcctcgaagccttgctgcaacaggtgctggaccacacgctgggcccggatgcgtttcccggctacagcgtggtcgtgggtttgttggtgtacccgctgtacaccggcgccctgatcctgtttctcgacgcccgcacccggggcgagtcgccgcgcaccaaggacgtgtgggccatggccttgagcctgtggccgcgttttgccctgctgacagccatgagcaccttgctgattctgttggggctgtcgctgtatttcctgccgggcttgtggctgatggtggtgctggcgtttgccgaatacctgctggtgctgcgcggcatgcccgccctggaggcgatgaaggaaagctttcgcctgacccgcgggcatttctggcgcatcctggtgtgcctgctgtgtgtgatgacgccgttgtggctgctcaagggcgccagcgtggcggcctaccctgagccggcgccgctgctggggctattgatggacagtgcccacagctttttgcagttgtttaccagcgtggtgttgttccgtttattcatgctgatcggtggcgacgccgacgtgcggtgatatgctccgtggctcttctgacacgcatataagccgagccgatgacccgtttattgcgcatcaccctgttgagcctgttgatcatcgccggcctgctggccgcgctgatctacagcctgacctggcgccctgccgacaaagagaccctgcccgtcagctgcgtggcaccccgcgcgccgacgctgttgccggggcaggcgctcaaggtcatgacctggaatgtgcaatacctggccggcaagaactacgtgttctggtacgacaccccggacggcagcggcccggacgatcgccccaccgtcgaagacatggcctttagcctcgacgaagtggcgcgggtgatccgcgacgaacaacccgacatcctgctgttgcaggaaatcgatgaaggcgccaaaccgtcccactatcaggaccagcttgcactgttgcaggagcgtctggtggacctctacccgtgcagcgcccaggccttcgactggaaagccgactttgtgcccagcctgcacatcttcggtaacgtggggcgcaagctcgctacgctcagccgctaccagatcgaacacgccgagcgcctgcaactgccggccgccgaagccaacttcatcagccgccagttccagcctaaacctgcgttgctgctgacttacctgcccttgagcgatggcggccaactggcggtgctcaatacacgcctggacggcggcgcacctggccgctcggccgcgcaacaacaggtgcaagccacagccaaactgctggataaattcgaaggccggggcacgccctggttgatcggcggggatttcaacctgctgccactgggccaatacctgcgcctggacgcagctaagcgcgggcagtattcgccggacagcgagttgcacctgctgtgggacaagtacccgatgatcccgcgcaatagcgaatctagcgggattgatcgtgagaaatggctgacgcacttccccaatgacccgagcctggacaggccggatcgcaccttggattacctgttctacagcccgcgcatcaagcgggtggaggcgaaggtgaggcaggaggacacgttgcgcatttccaaccatctacccgttatcgcccgcttcctgctgcctgccgcgcaataacccacatcattattcttttgtgggagctggcttgcctgcgatgccgccgatgcggtctttcagtgacaccgcagcgatgcgatcgcaggcaagccagctcccacatttgaactgcatcgcgcttacttacgcggcttgattcgggctgtcgcttcggccaccaacgggtcatccggccagtaatgcttagggtaccgccccttgagatccttcttcacctcggcgtaggtactgcgccagaagttcgccaggtcctgcgtgacctgcaccggccgacgcgccggggacagcaagtgcaacttcacggccaggcgcccgccggcgatacgcggggtgtctgccagcccaaacaattcctgcaagcgcaccgccaggatcggcggctgttcgctgtagtccaggcgtaccgatgaccccgacggcactttcacatgctgcggcgccagctcttccaggcgttggggcaaaggccagggcagcaggttatgcaggtagctggagatatccaggttggcaaaatggctgaggcgcgagaccttgcccaggtaaggcatcagccaatgctccaggctggcgagcagggccttgtcgctgaggtcgggccactcgctggttttgcccgcatccagctggcgcagcaacatcacacgggcttgccactgacgcagttccggggtccagggcagcagttccaggcctttgcggcgcaccaggttgaccagcgcctggctgcgggcggattcgtcgaggccggtcagcggttcgcggctgagtaccagttcgccgactttgcgctggcgctcggcccgcaacacgccttcacgctcgtcccagtcgagttggtcgacgttgcgcacttgctcggccagcactgtgtcgaacagcgccgggtcaaaatccgccgccaggtagatgcgctcttcgcgctggccctggcggctgcccaggtcggcgatgaccagccagggttgtttcatcaggctgtcggcttcggcaaatagcgctgctcggccattggccaggcgatattcagcgccaccggcgcggcgttgttgggcgacgcggtccgggtaggccagtgccagcaaggcgccgagccagcgcgggtggtcggggttgtccaccggctgggtcgccttgccgcgcaggtagccacggtattgccgggccagttgcttggcgcgctgcacgccaccttgggtacctcgcgcacgctcttcaccagacatcagcgccaggcggctgtgtaaatcggcaccgccgccgcgcaggatatcgcgctcgcccaacagagccgcgacgtcacaggccgtggcggccagccccaagtcctggccacgcaataacagatgggcaatacgcgggtgagcgggcaactcggccatcttctggccatgggcggtgaggttttcttcgctcaatgcgccgaggcgttgcaacagatcctgagcctgggcatacgcggcagtcggtggtacgtccagccacaccaactggttgggcgtcacgccccaacgggccagttgcaaggccagccccgccaggtcggcggcgaggatttccgcgctgccataagcggccagaccgtcgtgctggtcttcggaccacaaccggtaacacacccccggctctaaccgccctgcccggccggcgcgctgggtggcgctggcgcgggagatgcgctgggtgtcgaggcgggtcatgccgctgccggggtcgaaacgcggcacccgcgccaacccagcgtcgatcaccacacgcacgccgttgatggtgaggctggtctcggcgatgttggtggccagcaccactttgcgcttgccggccggcgccgggtcgatggcggcgcgctgggcattgaggtccagctcaccgtgcaacgggcatagcagcacatcagggcgatcacccaaggcctcggccagttgctggttgacccggcgaatctccgcctgccccggcaaaaacaccagcacgctgccggtttcgtcatgcagggcttcgaggatggtctgcaccacgcgcggctcgataaactccccggcctggtacggccggccccagcgcatctgcaccgggaacatgcgcccctcactgcgcaggatcggcgcgtcatccagcaggccggccaggcgttcgccttcaagggtggcggacatcagcaggattttcagcggctgctcgtcgcgaaacaactcgcgaccgttaaggctcagggccagcgccagatcggcgtcgaggctgcgctcgtgaaattcgtcgaagatcaacaagcccacgccgtccagtgccgggtcgtcctgcaggcggcgggtgaggataccttcggtgaccacctcgatgcgcgtgttggggccgactttgctgtccaggcggatgcggtagcccacggtctcaccgaccttttcgcccagctcactggccagccgttcggcagcagcacgcgcggccaggcgccgaggttcgagcatcaggatggtttgcccggcaagccacggctcatgcaacaaggccaagggcacgcgggtggttttaccggcgccggggggcgcttccagcacggcttcatggcgatgcgccaaggcgtcacgcagggcgggtaaaacatcatcgatcggcaacgaattcatactggctccaaagcagagcggcgagtataacggcgaactgccggatgccgatgcgggtctcaaaaacacccacgctttgggctgtgaatgcagtcgagggtggaagctggcttgcctgcgatagcggtgtgacagttgccgctgtatttcctgaaccgtcgcaatcgcaggcaagccagctcccacattggttcatcggcgcctggccgatctggcttatagtcacccataaatatgttcaggagactttttcatgcgtatcgcttcccgtgtcatcggcggtgtcctcgccgtcaccctgctgagccaactcaccgcctgcgggtcgattttctaccctgaccgccgtggccagatcgacggcaagatcgacccgaccatcgcggtactcgatgccctcggcctgttgttttatgtgatccccggcctgatcgccttcggtgtcgacttcgccacgggcgccatttacttcgaaccgggcaagaccgcccaggtcgcgcccgagaaactgcacgaagccatcggcgccgacggcacggtcgataacgccaagctgcaaagcatcatccagaaagaaaccggccgcaccttgccgctggacgacccgcgcctgatccagttcaagggcagcgtgcagcaactggcggccctgggcctgcagcctgccgcgtaaggactgctcatgaccagcagccccgaacacgcaaggcttctgcgcctggccacccgcgcctcggtgggcgtggcctgtgtgttgattgtgaccaaggccatcgcctggtggctcagcggctcggtgagcatgctcgccgggttgaccgactcactgctcgacggcgtaacctcgctgttgaacttgctggcggtgcattacgccctgcgcccggccgatgacgatcaccggtatgggcatggcaaggcggagtcgctggcggggatggcgcaggccttgtttatcgccggcagtgcggtgctgattgcgctccaggcgtatgaacggctcaagcatccggagccggtcggggcaccgtggttgagtatcggcgtgattatcttgtcgctggcgctgaccgtggccctgctgatgctgcaacaccgcgtggtgcgcgagaccggctccaatgcggtgcgtgccgactcgctgcattaccgctcagacttgctgctcaatggcagcatcctgattgcgctggtgttggcaggttttggctttcatcaggttgatgcctggtttggcctggggatcgccgcctacattctgtggagcgcgatccagatcgccagggaaagctttgcggtgttgatggacgaagagctaccgccggatgtcagccagcacatgctggaactggcccgcggcgtgcccggcgtactgggtgcccacgacttgcgcacgcgggtttccggcaaccactggtttgtgcagttgcacctggagttgccaggggaattgaccctgtcggtggcccacggcatcagcgaccaggccgccgatgccattcaccgggaatacccgaaagccgaagtgctggtgcacgccgacccacgggaagtggtcaccggcaacaaaacctagtactgcacctgatacccgcgactgcccaggcagttgccctgggcctggcggtaggtttgcaccactgccgggtcgggggcgtaagtcacggtgcgggggtcgaagccactttgctgcaccgcccagcgataacagtcgtagccgtcctgctgtacctgggctggcgattggccgttggccgggtaagccaccacgtcataaccgttgccttgaggcgtcggcgggggtgatggcacctgcgtcggtggttgtaccaccacgtattgctgggtgctttgctcgtaggcgtaataggcgcctgcggcgaggaacaacagcgagccgcctacccacacttcacgcgcgtagtccggcaggtaatgcacgcgaatgccatagggcggcgtcaccactacgtagcgagggccttggggccggtaccagtagccacccgagaagaagtaatcctggccacggtaaggcacgcggtaattgcggtcggggaaacggtcgatgacataaccagggcgatgctgcgggcctgggccccagccattgccatgcccgtcaggacgaccgggccaacggttatcgttgggatggtcattgcccggacgcgaaccagggccaccggcctcccaatgcctgttgtcatcgttgcgtcgggggatatcacggtaataaccctggcgcggctcctgggtctggcgcacggtatcgggccggccctgaatcggcaggttatgctcaggccgcggcccaccttcggggccccgttcgtgctgcccttgcggcccatgcccctgtcccggtgagttatcacgttcgtcggccatcgcctgggagccgacgctgaccaccagcaaaccaacacctgccatacgccagatgcgcttcatgcttttcctcactgcggattggggcttgatcatgagactggaaaagcctcgcccggttctgagacaggttatcagtcacgagaactattttctgaaggcaaaacgcgcacaaagaaaaaggggtgacccgtcggccaccccttgagaatttcgtcctggctcaacgcttttgacgttggctcacctcacgccgtcttgtggacagtgtgcagcctggaggccggctcaaccctgctggggcggcggccgcaacgggcctgattgggcgcgttgctgtggactgttgtccaggcggtgattctgttggtaatcataggcgtgccgggcgggcagaggattgcgaagattgcgtcaataaacagtgcttgcgcaatttttaacccttcatggataattcaccgcaatagttacgacaaaggccaacccaatgagcaagcttgaccgatacgacctgagtattctggcggaattgcagcgcgacgcgaggatctccaaccaagagctggccgaacgcatcggcctgtcgccttcgccctgctcgcgccgggtcaagcagttggaagacgacggctacatcgcccgccaggtcgccttgctcgaccgcaagatgctcggcctgagcctcaccgcttatgtattgatcggcatggaccgtcacacgccggagcgcttcgagaatttcgaagccgccatccgcaccctgccgcaagtgctggagtgcagtttggtgaccggcatggatgcggactatcagttgaaggtggtggtgccggacatggaccattatcagaagctgctgctgggccacctgacgcggattgaaggcgtgaccagcgtgcgttccagctttgtgctgaaccaggtgctcaacagcaccgaactgcccctgacccacctgcgcacctgaaaacaacggtgggagctggcttgcctgcgatggcggcgggccaatttgcatcacagtacctgacagaccgctatcgcaggcaagccagctcccacagttcgatggtgtaggactcaggtcaatgttgcgtctgcgacgctgccgtatactgctcgcttgtcttgtcggaagagccccatgaacaacatcgatcccgccctgtttgaagaatggatgatgactggcctggtcagcattctgatcattttcatgggctttatcgtctgggacctggcgaagaaatccaaggccgggcgctttggttcgttcattctgtttttcgtgctgggcctgggcgtggccgcgttcatcatcaagagcgtggtgatcggcctgattgaatccggcgccttataagcgcgccggcactgccttccactggccttgatccaggccgtcgatcgaccactcaccaatacgcacgcgcaccaggcgcagggtcggcaagcctaccgccgcggtcatgcgccgtacctggcggttacgcccttcgcgaatcaccaattccagccaatgggtgggcacgcttttgcgaaaacgcactggcgggttacgcggccataatgccggttcatccagttgccgtgcctcggcgggcaaggtcatgccgtcgttgagctccacgccttggcgcaggcgttgcagctgttcttcggtgggctcgccttctacctgcacccagtaggttttcgccagcttgtgcttggggtcggcaatccgcgcttgtagctgaccatcgttggtcaacagcagcaggccctcgctgtcacggtccaggcgccccgccgggtaaataccgggaatatcaataaaatccttgagcgtcgcacgcccaccttcgtcgctgaactgggtcagcacgtcgaacggtttattgaacaggatcaacttcggctcggccggaggcgccttggcaacgcggcgagcggcagagtgcggaggtttcacgccagggcgacgtgaatcgggacgagtgggacgggacatggcaaaggaacatctaacggtcaggaccgacaatgctagtggcctgaccgctaaatgaccatcccaaccgcttagcggaacggcggctcgtcgaagctgcgcagtttgcgcgagtgcaacgagttgagttcggtgcgcaacaggtcgaccgcctcgatgccgatcttcaagtgctggctgaccgcacgctcatagaacgcattggccgaacccggcagtttgatttcgctgtgcaagggtttgtccgatacgcacaacaaggtgccgtaaggcacgcgcaaacggtaaccctgggcggcgatggtgccgctttccatgtccacggccacggcgcgggacaggttgatcagcgggcgctcctgggcccagcgcagttcccagttccggtcgtcataggtcagcacggtgccggtgcgcaggcgttttttcagctcttcgcctttttcgccagtgaccttggccgccgcctgctgaagcgccaactgcacttcggccagggccggaatcgggatgttcggtggtaccacgcggtcgagaatcccgtcgcggcgcatgtaggcgtgggccagtacgtagtcgccgatggtctgggattggcgcaggccgccacagtggccgatcatcagccagcaatgcgggcgcaatacggccaggtggtcggtgatgttcttggcgttggacggacccacgccgatgttcaccagggtcacgccatggccgtcggtggcctgcaggtgatacgccggcatctggtagcggtgccacaccacgccggcagcaatggccgaggcttcgccgtggtccatgctcttgtcgatcaccacgttgccgggcaacaccatgcggataaatcgcgggtcgctgcgcagttgctccaggccatgcaggatgaactggtccacgtagcggtggtagttggtcagcaggatccacggctgcacatggcgccagtcgctgccggtgtaatgcaccaggcgacgcagggagaagtccacgcgggcggcatcgaacagggccaggggcagtgggtcggtgttttcccagtcgtacaggccatcggcaatgccgtcggtggcggcggacaggtcggtactggggaatacacgggccagggtcgcggcagtgacgccggagccggccagttcatcgccctgctccaccacataggggtacgggatgttctgctgactgacgcccacttccaccgtcacggtgaagtcgtgcatcagcggcaccagttgctccagcaggtacttacggaacgcggccgggtgggtcacggtgacgctgtaggtacccggcagttgcaccttggcatacgcccgagtggtttgggggacttcaccgtggcagtggtaggtcaggcgcagttccgggtagcgaaacagtgcgcgttgctcggcgtcgggctccacgcggtccttgaggtattgcttgagcgcctggttgagcgcgccagtcgcacgctcatgcagcgccgccagccggtccacggcctcttcggcggttttaacgacaacaaaagcttcggtcacggtaagcatcctgtgttctgacttgcaggcctttatcttgcctgtatccnnnnnnnnnnnnnnnnnnnnnnnnnnnnnnnnnnnnnnnngcggtggtccagccagcaattatgtagctgatagaccgctatcgcaggcaagccagctcccacatttggactgtgtttattcagagggattgcggggttgagcgggcgacaatcgcttccacgtcgacgccacgcggcaaggtgccgtatacccgccccgacgattcacccagccggctggcaataaacccatcgctgaccgccgcattacccgcctccaacagcaacttggcctgcaacgccagggcgatgtcctcggtcagttgccgcgcccgatactggatatcctgggtgtccatgaacgccgccttcaactgctcgatatgccgcgccaactgtttgtggccgtggccatcgcccagctccacgaacagcgcttcgagtactcccggctctttggacagtgcacgcaatacgtccaggcactgcacattgccggaaccttcccacgtcgaattcaccggtgcctcgcggtaaagccgcggcaggatgctgtcctccacatacccggcaccgcccatgcattcggcggcttcgttgatcatcgcgggcgcgcgcttgcagatccagtatttgcccacggccgtgaccagccgggcgaatttggcttcatgcgcatcatcaagatgatccagggcgcgccccatgcgcaggctcaaggccagggccgcttcgctttccagggccaggtcggccagcacgttctgcatcagcggctgctcgctgagcacccggccacccacctggcggtgggcgcagtgatggctggcctgggtcagcgcctggcgcatcaaggcgctggagccgaccatgcaatcgaagcgggtcatggcgaccatttcgatgatggttggaacgccgcggccttcttcaccgaccatccacgccagggcgccgcgaaattccacttcgctggaggcgttggagcagttgccgagtttgttcttcaagcgctggatgtagaactcgttgcgcgtgtcatccgggcggtgccggggcagcaggaaacaggtcaggcccttgtcggtctgggccagggtcaggaaaccatcgcacatcggtgccgagcagaaccacttgtgccccaccagttcataggcttggcctgcgccgcccgctcccacggggtaagcgcgggtggtgttggcgcgcacgtcggtgccgccctgcttctcggtcatggccatgccgatagtggcgccggccttatgcgcgatgccgacattgcgcgggtcgtattgggtactgagcactttaggcagccagaggtccgccagctccggttgcaggcgcagggccggaacgcaggcgaaggtcatggtcaacgggcagccgctgccggcttcggcctggctgtgcaggtaggtcatcgccgcacgcgccacatgggcgccagcctgcggatgggcccacggcagcgacggcaggccatgttcgacggcggtgcgcatcagctcgtgataagccgggtgaaactccaccaggtcgatgcgatggccataacggtcatggctgctgaacaccggtttgttctggttggccaggaacccggctaccatcaacggcccacccgccagcgcgccgtaggcatccatgcgcgactcggcccagccagcgccaaagcggcgcgaccattcctgcaaaggcaagtcgatgcgatacaggttggtgccgtccagggacggtggctggttggtgacgtcgtgggtttcggcaaactgatgcaggttcatgacgggcctcctggaaaaaaggccgcatcgatttcaggctgcctgtaggagcgcgcttgctcgcgaaaaacctgagagcaacgcgctaacccaggaggggcgcgttatcgttgaggttcttcgcgagcaagctcgctcctacaaaaaaacacagatcgattgaggccggtttttccagttaagcatcgccatcgcgcttaaaaaagtggcatacgcgccgaatgttcggcgctttcaccctcatccgcgcacagcacgctacgttcaagtgccgcctgcaaagcaacgaaacgcaccggcttggccagccgatccgtcatgccaatgccatggcagcgctcacgctccggcccattgggcgaagagctcagggcgatcaccggcaattcaccgcagccaggcaatgcgcgaatctgacagcacaacgaaaagccaccctcaggtacgtccagcagcacggcgtcgaagctatgcccttgcaatgcagcgagtgccgccgggccgctgtccacggttttgacccggtaacccagcttgagcaacatgccacgcaccgccagttggcccacgctgttgtcgtccaccaacagtaccgtgcactcctgaggcgcacgctgtgcaggcagcgtttgcgtggcgggcgtcacctgctgcggcacggcgctgacgtccacttccaactggaagcgactgcctttacggggctcagaatgatgggtcaggcgcccgcccagcagttcgattaactgccggcagatcgccaggccaatgcccaggccgccgtattcacgcgtcatcgagccgtccaactgaaagaaacgctgatacagcgtggcctcatcgagaaaggcgaagccgataccggtgtcggtgacgataaagctcaggtgcaaggcgccatccccttggggcacgcccaccactcgcaagcgcaccgcgccgacgtgggtgaatttgaaggcgttatcgagcaggcaatccaggcactggagcagtttgtcggcatcgccgatcagccgatccggcacctcatcggccacatcaatggagaacgccaggcctttgctctgggcgctgccggtgaattgctggcgcaaggtatcgagcgcgccgcgcaggctgaatacctgcggctgggccaccaggcgaccggcctgcaactcggtgagggtgaggatgccgttgaccatgcgcatcatgtcccgcgccgagccggcggcggtttgctggtactgcgtcaggtcatcgtccaatgacacggtttgcatcagctccagcgagccgatcacaccgttcatcggcgtgcgtaattcgtgggtcagggtggcgagaaattcgtctttaaggcggttgctgcgggccagttgctggttgagcgcttcgagtttctggctggcatcgagcagaatctgcgcctgttgttcgcgcatgccgttgatgcggtcggccagggccagggacaacagcgccacttcaatggccgagccgagctggctggcgtacatggtcaggaacacgttaggcaggtaacccagcaccatcagggtattgaccaccccgccgagcagaaaggccgaccaggcgatgatgaaataacgcgccatgcgctgcccgcagtaccaggccttgatggccgccacgaagatggtcacggtaaacaccagcgccagcgcagtggccaggcgcagggccacggcgtaactggtcaacaacgccagcgccatcaccaacccaccacaggctgcgagcgccagcaggatgcggttgagccagcggctgtgctgcgcggtgtgcaggaagctgcgcgcgaacaggctgccgaacaaagccgccgagccgatcaggaagggcaccgccgcattcgcccaccacgggttgttcggccagaagtactccaccgccacaccattgaccgacagctgatacaagccgaacgaggcgatatagaggatgtaatagaggtagctggtgtcgcgcacgctcaggtagatgaacaggttgtagatcagcatgcccagcaacacaccgtagatggcgccgagtacgtacaagcgcagcggctgctcctccatgtaggcggtgccggcccataatgtcagcggtgcctggatcgagccttggctttgcaagcgcaggtagacggtttgttgctgctcgggcaagaagctgagcttgaacaggtagttgctctggctcacctctcggctggaaaacggcaacgcgctgccggttcgggcggtgaggcggtaattcccggtaccgtcgttctggtaaaggtccaggcgattgagcggcgggtaggccagctccagaaaccaggtacgtggcgcgcgggggtctgtggcggtgtagtgcaggttgaccttcagccagaacaccgagcgtgaatagccggcattgagggtgtctttgtcatgggtcttgaactgggcggcataggcgggggagctgacatcggcgatggtcagggcatcggttgggtcttcgagcacttgcatgacccggcccaacgggaggcttcgcgtgtcctggttgaactcgacggcgctggcgagcatcggcagcccgcacaataaaaaaatcagcaaatagcgcatagagccccagcgtagcctggtccggttgtgtcaaaagccccccattccttttgagaagacgtacaccggcgatacagtaagttgtttggatgcactttagcatagccagtaaaagccattagccactgctggatctttttttaggacagctctagggcaatgctttcagctcatttccgtgcagcgcgcagccacggcaagtcgcgccgcagcggcaaacttctgccatcgccagacagccacgcaaaaagcgtttggtggtaagctcgcgcaccatgaatatctactgctctcgccccgttgtcctctgtctctccggccacgaccccagtggtggcgccggcctgcaggcagatatcgaagccctgctcgcccagggttgccacgcggccccggccgtcaccgcgttgaccgtgcaaaacaccgtcaatgtcagtgatttccgcgtgcttgaccgtgagtgggtactggcccaggccaatgccgtgctcggcgactctgaagtcgcggcggtcaagctgggcatgctcggctccaccgcgatggtcgacaccgtggtcgaactgctgcaggcgcacccgcatttgccggtggtctgcgacccggtgctgcgcgccggcggcggcggtagcctgggcaaggacgaggtcggctatgcgatgcgcgagcggctgctgcccctgtcattgatcgccacccccaacctgcccgaagcgcgcatccttgcggaactgcccgacggcagcgccgacgactgcgccgagaagctgctgccgtacatcaagcacctgctgatcaccggcggccatggcgacgagcacgaagtgcacaaccgcctgtacagccgcgacggcacgcgccacacctttacctgccagcgcttgcccggcagttatcacggttcgggttgcaccttggccagtgcgctggccgggcgcattgcccagggcgaaggcttggccagcgccgtgcaaacggccctcaactacacgtggcgtaccctgcgcgatgccgaacaactcggccagggccagttcgtgccgcgccgattgccgctggatttctgctcgtaacttatcgctcgtcagcaaggggtttgcccgatgaaactacgcggcctttacgccattaccgacagccagctgttggccggcaaattcctcgcctacgtcgaggcggcgctggacggtggcgtcaccctgttgcagtaccgcgacaaaagcagcgacgaggcacgccgcctgcgtgaagccgaaaagctgtatgagctgtgctcgcgctacaagactcaattgatcatcaacgacgatgccgaactggccgcgcgcctgggcgtcggcgtgcacctgggccagaccgacggcccgctgacctcggcccgggcactgctcggcgccaaggcgatcatcggcgctacctgtcacagccagatcgaactggccgaacaggccgccaaagaaggcgccagctacgtcgcctttggccgcttcttcaattccacgaccaaacccggcgcacctgccgccaccgttgacatgctggcccaggcccgcaagcgcctgcacctgccgatctgcgtgatcggcggcgtcaccctggaaaacgccgagccgctggtggcccacggggccgacctgctcgccgtggtccacggcctgttcggtgccgacagcacccaggaagtcacccgccgcgcccgcgcgttcaacgtccttcttaaatcttcagtttagagagcccgaccatgtcccgttccgaaaccctgtttgccaacgcccagaaacacatccccggcggtgtgaactcccccgtgcgtgcgttcaagagcgtgggcggcacgccgctgttcttcaagcatgccgaaggcgcctacgtcaccgatgaagacgacaagcgctatgtcgactacgtcggctcctggggcccgatgatcctcggccacagccatccggacgtgctcgacgcggtgcgccagcaactgcaacacggcttgtcctacggcgccccgaccgcgatggaaaccgagatggccgacctggtctgctcgatcgtgccgtcgatggagatggtacgcatggtcagctccggcaccgaagcgaccatgagcgcgatccgcctggcccgtggtttcaccggccgcgacaacatcatcaagttcgaaggctgctaccacggccactccgacagcctgctggtaaaagccggctccggcgcgctgacccaaggcgtacccaattccgctggcgtacctgcggcgttcgccaagcacaccctgaccctgccgttcaacgacatcgcggccgtcgagcagatgctcagcgaaatcggccaggacgtggcgtgcatcatcgtcgagccggttgccggcaacatgaactgcgtgccaccggccccgggtttccttgagggcctgcgcgagcagtgcgacaagcatggcgtggtgctgatttttgacgaagtgatgaccggtttccgggtcgccctcggtggcgcccaggcttactacggcgtcacgccagacctgagcaccttcggcaagatcatcggcggcggcatgccggtaggctgcttcggcggcaagcgcgagatcatgcaacacatcgccccgctcggcccggtctaccaggcaggcaccttgtcgggtaacccgctggcaatggccgccggcctgaccaccctgcgcctgatcagccgcccgggcttccacgccgagctcaccgactacaccacacgcatgctcgacggcctgcaacaacgcgccgacgccgccggcatcccgttcgtgaccacccaggccggtggcatgttcggcctgtacttcagcggcgccgacgatatcgtcaccttcgatgacgtgatgggcagcgatgccgagctgttcaagcgcttcttccacctgatgctcgaaggcggcgtgtacctggcaccgagcgcctttgaagctggcttcacctcgattgcccatggcgaagccgaactgaaattgaccctggatgctgccgagcgcgccttcgcggccctgaaataagtgacggcaacctctgacgttgcccctggcagcgtcagatttgctactttgcttacagacaattcctggttttttcgagaattgccctgcaatccggcagataacttgcccaagcagcagaaaaacgagtaaagactttgtaagcagaggcctgcttatttcataatgcgcgcttattggactcccccgagggtcccgcgccccgtcagaggtaagtcgattcccatgaaacgcaccggccgcaccctggttctgggctgcctgttgctccttcaaccgctactggcacatgcccaggccggcggcaactcgttgttaatcccagcgatgggtcgttgcaccctcaatacccagccagacagccaggccgaagccctgagcgcgtgccagaaacaggccgaggacggggatgcacaggcgcaatacgagttgggcgagtactaccacgacagcaagaacccggccgttgacctcaacaaagcgttgagctacttcgagaaagcctcgttgcagggccacgcccaagcgcaataccagttgggcaacatgttcttcaaaggcgaaggcgtgccggccaacaacgtccaggcgtacatcgtgctgaaaatggccgcggtcaacggcgctgaagacgcactggacaccgccgacgaagtcgccgagcacatgcagcgcgatgaactggaagtggcgacccaggtgctggggcagattttccgcaactacctgcaggaattgcagagcgccgatgggcgttcgccgttctcaccccttccctgattttttttgtagaccttacatcgctatcgcaggcaagccagcgataggcgcgactcggtctaaagccctacttctcaggcatcggcatcggaaacggcatcacattgctcgtgccccgtgcttcgctgatcttcggcgtccccaggcgctcgacttcatcgatgcgcacaatcgaatgcatcggcacaaagctgcgcaccacgccttcgaactgggccttgagcttttcttcgcccggatcgaccaccaactgggtgcgctcgccaaagacgaactcttccacctccaggaagccccacagatcgctttgatagatctgcttggcgtacatttcgaacacctggccctggttgaggaaaatcaccttatagattggagcttcacgtttggtcatggtgggcgaacaacacatggggatataaaagagggcgcgaactatagcatggcacccgatgcacagcgctaggaaccaatgggcatgccccctataatgcgcggttctttaccaccagttgacgattcccatggccaagaagctttacatcgaaacccacggttgccagatgaacgagtacgacagctcgcgcatggtcgacttgctgggcgaacaccaggccctggaagtcactgcccgcgccgaagatgccgacgtgatcctgctcaatacctgctcgatccgcgagcgggcccaggaccgtgtgtattcgcagttgggccgctggcgcgaattgaaactggccaacccggacatggtgatcgccgtcggcggttgcgtggccagccaggaaggcgccgcgatccgcgaccgcgcgccctatgtcgatgtggtgttcggcccgcaaacgctgcaccgcctgccggaaatgatcgacgccgcacgcgtcaccaagctgccgcaggtggacgtgtcgttccccgaaatcgaaaaattcgaccatctgcccgaaccgcgtatcgacggaccgagcgcctatgtgtcggtgatggaaggttgcagcaagtactgcaccttctgcgtggtgccttacacccgtggcgaagaggtcagccggccgtttgacgatgtgctggcagaaatcatccacctggctgaaaacggcgtgcgcgaagtcaccttgctgggccagaacgtcaacggctaccgtggccagaccgatgacggccgcctggccgacctggcggaattgatccgcgtggtcgccgccgtcgacggcatcgagcgcatccgctacaccacctcgcacccgctggagttttccgacagcctgatccaggcccacgccgaagtgccagagctggtcaagcacctgcacttgccggtgcaatcgggttcggaccgcattctgtcggcgatgaagcgcaaccacaccgcgctggaatacaaatccaaattgcgcaaactgcgcgccgccgtgccgggcatctgcatcagttcggactttatcgtcggcttcccgggcgaaaccgagaaagacttcctgcagaccatgaagctgatcgaagacgtcggtttcgacttctcctactcgttcgtctacagccagcgcccgggcaccccggctgccgacctgctggatgaaaccccggaagcgttgaaaaaagagcgtttgaacgcgctgcaacatcgccttaatcagcaaggctttgaaatcagccgacaaatggtcggttcgatccagcgcattctggtcaccgattattcaaagaaagacccgggtgaattgcaggggcgtaccgagaacaaccgaatcgtcaacttccgctgcgataatcctacgctgatcggccagtttgccgatgtgcacatagatgcggcgcagccacactcgttgcgtggctcgttgatcaactgatctcgctgaccggatgaagatcaaaatgtgggagctggcttgcctgcgatagcgatgtatcagtgccctatgtgccaactgaccgaccgctatcgcaggcaagccagctcccacagggattcttcagggttatcgagagtggggccaggctatttaagtgctttcgcacaccgacgcctggcgttattctctctctcacctcatcagccaaagggcggctaaaagcaaccttgaacgcacccatagcagaaccccatcgttttatcctcgagccttttgaggctcgccgtttcgccaacctgtgcggacagttcgacgagcacctgcgcctgatcgaacaacgcctgagcatcgagatccgcaaccgcggcaatcagttcgagctcattggtgaaccccaacacaccacgtctgcagaaaacctgctgcgccgtctctaccgtgaaaccaagggtagcgagctgtcgccggagaccgtgcacctgtacctgcaggaatcggctgtgcaagacctggccaataacccggtggccgaagccagcgtggccttgcgtaccaaaaaaggcatgattcgcccacgcggcttgaatcagcagaagtacgtcaaggaaatcctcggcaacgacatcaacttcggcatcggcccggccggtaccggcaagacctacctggcagtggcctgcgccgtcgacgccctggagcgcgagcaagtgcggcgcatcctgctggtgcgccctgcggtcgaggccggcgaaaagctcggcttcctgcccggcgacctggcccagaagatcgacccgtacctgcgcccgctctacgacgcgctgtacgagatgctcgggtttgaatacgtggccaagctgatcgagcgccaggtgatcgagatcgccccgctggcctacatgcgcggccgtacgctcaacaacagcttcatcatcctcgacgaaagccagaacaccaccgtcgagcagatgaagatgttcctcacccgtatcggtttcggctcaaccgccgtgatcacgggcgacatcacccaggtcgacctgcccaagggcaccaagtcgggcctgggccaggtgatcgaggtgctcaaggacgtgccgggtatcagcttcacgcactttatgcccaaggacgtggtgcgccacccgctggtgcagcgtattgtcgaagcctatgagcgtttcgaacaccgcgacgacgcgcccgccaaggacgctcgccacgatgcttgagctagacctgcagctggccaccgacgcgcccgcccccagcgaagcccagttccgccaatggtgtgaactggccttgcgccagcgcaccgccgactcggagctgaccattcgtctggtggacgaggccgaaggccgtgagctgaaccacacctggcgccagaaagactacgccaccaacgtgctgtccttcccagccgacgtacccgacgaattgctggatatcccgttgctgggcgacctggtgatctgcgtcgcggtggtcgagcgcgaagcggcggaacaaggtaaggaacttgaggcccattgggcccatctagtcatccacggctgcttgcatctcttgggttacgaccatatagacgatgacgaagccgaggaaatggaagcactggaacgaacgttgcttgcagaactgggtcaccgcgacccgtatgcagacgacgaaagctgatcaacactcaattgtcatatcaaaggatttagagtaatcgctatgagcgaagaccgatcgagcaacgggcagaagtcatggttgggtaaactgacccaggcttttgcccacgagccgaaaaaccgccaggagctcttggagctgctgcgcgatgcacaccagaacaaattgctggacagcgaagcgctggccatcgtcgaaggcgccatccaggtggctgacctgcaagtacgcgacatcatggtcccgcgctcgcagatgatcagcatcaaggcgacacagaccccacgggaattcctcccggccgtgatcgactcggcgcattcgcgctacccggtgatcggtgaaagccatgacgatgtcatgggtgtcctgctggccaaggacttgctgccgttgatcctcaaggagaacggcgacagcttcaacatcaaggacctgctgcgcccggccaccttcgtgccggagtccaagcgcctgaatgtgctgctgcgcgagttccgcgccaaccacaatcacatggccattgtgattgacgaatatggcggcgtggccggcctggtcaccatcgaggacgtgctggagcagatcgtcggcgacatcgaagacgagcacgacgtcgaagaagacagctacatcaagccgctgcccagcggtgatttcctgatcaaggcgctgacgccgatcgagaacttcaacgagttcttcgacagcgagttctcggacgatgagttcgacaccgtcggcggcctggtgatgagtgcgttcgggcatttgcccaagcgcaatgaaaccaccgagatcggtgcgtatcgcttccgcatcctcaatgccgatagccgtcgtatccatctgatccgtttgacacctatcgcccgctaaggactgacatgcgccgtatgatcgcacccggctggcccggtaatttgctggccgtggtggccggcgccatcacaactctggcgctggcgccgttcgatatctggccgttggcgctggtagcggtcggcctgttctatatcggcctgcgggagctctcaccccgccaggccctgggccgtggctggtgtttcggcttcggcctgtttggtgccggcaccagttggatctactacagcatccaccacttcggcggcgcttcggtgttgctggcggggttcctgatgctgctattcactgccgccatcgcctggttctttgccctgcccgcctggctgtgggcgcgctggttgcgccgtaacgaagcaccgctggcggacgcattgacgttcgccgcgttgtgggtcggccaggaagcctttcgtggctggttcctcaccggtttcccgtggttgtactccggttacagtcaactcgacgggccgttgaccggcctcgcgccagtgggcgggatgtggctgatttccttcgccctggcactcactgccgcattgctgtgcaacctgccgcgcctgctggcgagcaagcgcaatgccttcatcggcgcgggcctgttattgctggttgcgccctgggccattggcctggcgctcaagcatcacgcctggacatcgccgtctggcgcgccgctgagcgtggccgcgatccagggcaacgtcgagcaaagcatgaagtgggaccccgaccagctcaatgcacagttggcgctgtaccgcgacatgagcctgagctccaagcgcgtcgacctgctggtgtggccggaaaccgccgtgccggtgctcaaggagtccgtggagggctacctgggcatgatgggcaagtttgccgccgaccgggacaccgcgctgatcaccggcgtaccgattcgccaggaagtgcaccaccagaagcgctacttcaacggcatcaccgtggtcggtgaaggcgacggcacctacctcaagcagaaactggtgccgtttggcgagtacgtgccgttgcaggacatgttgcgcgggctgattgccttcttcgacctgcccatgtcggacttcgcccgcggcccttctgaccaggccatgctgcaggccaagggttatcagattgcgccgttcatttgctatgaagtggtgtaccccgaattcgccgccggcctgtcggcccagagcgacctgctgctgaccatcagcaacgacacttggttcggccgctccatcggcccgctgcagcacctgcaaatggcgcagatgcgtgcattggaggctggccgctggatgatccgcgccaccaacaacggcgtgaccgggctgatcaacccgtttgggcagatcaccgcgcagatcccgcagtttgagcgcggcattctctatggggaggtggtgccgatgcataacctcacgccgtacctgcaatggcgttcgtggccgttgatcattgtgtgcctggcattgtttggctgggctctgctggctgcacgaatgtccaaaacgctctgacctgtgggagctggcttgcctgctcccacattttgatctcctgtgttgcgcctaccggtaaaacaaccgataccccacctgccccaccgcttcattgatcaactgcccgctttgccacaccgccttgacctccggcatccagccacccagcggtcggccatggtccacacccagaaagcccaccggccctggcaccacggtgaaacccgccttttcaaaactccacaccgaacgcggcatgtgccaggcctgggtcactaccactacacgcttgatgccttgcggcaacaaaatctcggcgctcatctgggcgttttcccaggtagtgcggctgcgttcttctttccagcgcacggtgacaccgaagtcatcctgcatcgacacggccatcagctcggcctcactgggcggcgtgccgtagtgcaagccaccgctggtcagcactggcaaaccggatgctttggccagccgcgcggcaaaacgctcacgctccaggccaataccggtgggctggtcgctgccccaggcaacgtcaccgcgctcgcgccccgagcccagcaccacaatcgcgtcggcacgctgggccaaggtggcccagtcttcccgggccaaaggtggttctgtctccaggacacgggcgccccactgcaccatcactggcaggctgatcaaccacatcccgcccagcccgagggcaaagcacaagcccgccaggcgtggacggctgcggcgaaaccaccaagcacacgccagcaacagcagaaaaataccgggcggcaacaacagttgtttaatgaaataacgaaaaggcatcgggcatctccaaagatgcccgcagcctagatgcatcggggttttgcaacaatccttaccgacaacattttgataacgctaacggataacgcgtggctcacttgcaccgcacggaccggaagttctctggcccgcggccggtcgccaggtctttgagccagatgaccttggccgaatgagcgggcggggaagcctgcccatgggaggcgcggtcgtgattcaacgccaggtagttcttgatcaattcaagttccgcctggctcaagcctcgcaactccagctccaggggccgttcatcacgcaatcggcctgcggttcttgcggcatccaatgcccgacccaaacggtcgatcaatccttcatacaactgcggtttcgttaaagttcgctgcgattcaaccatcccctcacctcattgaagaaatacttgctccccactaaacagcgtagcccccgtggctgcgcctgcccggtgccgcgacagacggcccttgccgcgcaatcagggtttccctcgatagagtggggtcatgtatgctacggcgcttcctgtaactccacttcccgcagggtttgggcacggacgcgccgcttcttggtgtcgaacaacccggacagtgcaccgaagaggattaggccacccctatccagttcaaaagtagccatgcacgaacaatatcagccccgtgaaatagaaaatgccgcccaaaccttctgggacgagcaaaagtcctttgaagtcagtgaacagccaggcaaggagacttactactgcctatcgatgttcccttaccccagcggcaagctacacatggggcacgtgcgcaactacaccatcggcgacgtgatttcgcgctaccagcgcatgctcggcaagaacgtgttgcaacctatgggttgggacgccttcggcatgccggcagaaaacgccgcgatgaaaaacaacgtggcgcccgccaagtggacctacgaaaacatcgcctacatgaagacccagctgcgcagcctgggcctggcggtggactggtcccgcgaggtcaccacctgcaagccggattactaccgttgggaacaatggctgttcactcgcctgttcgaaaaaggtgtgatctacaaaaaaagcggcaccgtgaactgggacccgatcgaccagaccgtactggccaacgaacaggttatcgacggtcgcggctggcgttccggcgcgctgatcgaaaagcgcgaaatcccgatgtactacttcaagatcaccgcctacgcggatgaactgttgtcgagcctcgacgatctgccgggctggcctgaacaagtcaagaccatgcagcgcaactggatcggcaaatccaagggcatggaagtgcagttcccgtacaacgtcgactccatcggcgaagcgggcgcactcaaggtcttcaccacccgcccagacaccctgatgggcgcgacctacgtcgccgtggccgccgaacacccgctggccacccaggccgcacagaacaaccctgagctgcaggcgttcatcgctgaatgcaaaggcggcagcgtggccgaagccgacgtcgccacccaggagaaaaaaggcctgccaaccggcctgttcgtcgagcacccgctgaccggcgagaaactgccggtttgggtcgccaactacgtattgatgcactacggcgatggcgccgtcatggccgtgccggcccacgacgagcgcgatttcgaattcgctaccaagtacagcctgccgatcaagtcggtcgtgcgcaccagctcgggcgacaccaaccccgctccgtggcaagacgcctacggcgagcacggcacgctgatcaactccggcgaattcgacggcctggacttccagggcgccttcgatgccatggaagttgccctgatccagaaaaacctcggtgcctcgcgcacccagttccgcctgcgcgactggggcatcagccgccagcgctactggggctgcccgatcccgatcatccactgccaaacctgcggcgacgtgccggtaccggaagaccaactgccggtcgtgttgccagaagacgtggtgccggatggcgctggctcgccgttggcacgcatgccggagttctacgagtgcagctgccctaagtgcggcgcaccggccaagcgtgaaaccgacaccatggacaccttcgtggagtcctcgtggtactacgctcgttatgcctcgccgcattatgaaggtggcctggtggagaaatccgcagccgaccattggttgccggtggatcagtacatcggtggcatcgaacacgccatcctccacctgctgtatgcgcgcttcttccataagctgatgcgtgacgaaggcctggtgagctccgatgagccattcaagaacctgctgacccagggcatggtgatcgccgacacttactatcgtcgcgaagccaatggcgcctacacctggttcaacccggcggatgtcgagcttgagcgtgacagcaaagccaaggtcatcagcgccaagttgaaagccgacggcctgccggtggaaatcggcggcaccgagaagatggccaagtcgaagaacaacggcgtcgacccacagtcgatgatcgatcagttcggcgccgacacctgccgcctgttcatgatgttcgcctctccgcctgacatgagcgccgaatggtccgactctggcgttgaaggttcgcaccgtttcctcaagcgcgtctggcgcctggcccacgcccatgtcagccagggcctgccgggcaagctggacatcgacgccttgaacgatgagcagaaagccgttcgccgcagcatccacctggctattcgccaggccagccaggacgtcgggcagaaccacaaattcaacaccgccatcgcccaggtgatgacgctgatgaacgtgctggaaaaagccccgcaggcgaccgaacaagaccgtgcgctgatccaggaaggcctggaaacagttaccctgttgctcgcgccgatcacgccgcacatcagccatgaactgtggagccgcctgggccacagcggtgccgtcatcgatgccgcctggccggtgcaggatgacagcgccctggtacaggacacgctgcaactggtcatccaggttaacggtaaactgcgtggccagatcgacatgccggccagcgccagccgtgaagaggttgaagcagctgcacgtatcaatgagaacgtgctgcgctttaccgaaggcctgaccatccgcaaggtgatcgtggtgcccggcaaactggtcaatatcgtcgccagctaaatcggatcgggcgcagggcttgggctctgcgccgaactaaacctttagggcccgacaaggcccacctggtttcaaggggagcaacaaaatgatcaaacgcaatctgctggttatgggccttgccgtgctgttgagcgcttgcggcttccagctgcgcggcaccggcaccaatgagctgtcgctcaaggaactcgacgtcagcgcccgcaacgcctacggcgaaaccgtcacccagctgcgccagaccctggaaaacagcggtgtgcacgtgtacaacggcgccacctacaaactgatcctgacggatgagcgcgaaacccaacgcaatatcagctacgccagtgctggccgtgcgtccgacgttgaattgaacacggcgctgatgttcgaaatacaaggccgtgatcagttgccgttgatgggtgacaagatccaggtgcagaaagtggtgagccacgatggcaacaacctggtgggttcggactccgagaccctccaggtgcgcaaggaaatgcgtcgtgagctgatccagcgcatgatgactcgcctgcaaatgctcaccccggaaaaactggctgagctgcagcaagtggccgacaacaaggccaaggctgacgccgacgccctgaaagccgcgcaggaatatgaagacaacacgccgaaacaatcgcctgttgaagtccctgtcgagtaagccagacggggcgccgctggcgccccgttcgccccgcctatgaaacttgcccctgcccaactcgccaaacacctgcaaggtggtcttgcgcctgtgtatatcgtcagcggtgatgacccgctgctgtgccaggaagccgccgacgctatccgcaccgccgcgcgccagcaaggcttcgatgaacgccaggtgttcagcgctgacgccagtttcgactggggtaccctgctgcaagccggcgcaagcatgtcgctgttcgccgaaaagcgcctgctggaattgcgcctgccctcgggcaaaccgggtgacaaaggcgccgcggcgttgatggaatactgctcgcgccctgccgaagacaccgtgctgctgatcagcctgcccaagctcgacggcagcgcgcagaaaaccaagtggggcaaggcactggtagaaggtgcgcaaacccagttcatccagatctggccagtggacagcagccagttgccgcagtggattcgtcagcgcctgtcacagtcggggctttcagcgacgcaagatgccgtagagctgatcgccgcccgggtcgagggcaacctgcttgccgccgcccaggagatcgaaaagctcaagctgatggccgaggatgggcaaatcactgtcgaaaccgtacaaggcgcagtggccgatagcgctcgctttgatgtgttcggcctggtcgatgcgatcctcaacggtgagcccgcccacgcgctgcgtatgctcgagggcttgcgtggcgaaggggtagaaccgccggtgattctctgggcgctggcccgggagctgcgagtgctggcgaacattgccctgcaatacagccaaggcacaccgctggacaaatgcttcagccaggccaggccaccggtgtgggacaagcgcaaacccctgatgagcaaagccctgcaacggcactcggcgcaacgctgggcgcaactgttgctggaagcgcagcgcatcgacgcacagatcaagggccaggcagccggctcaccatggatgagcctgagccgtttgtcgctgttgatggccggccagcgcctgtctctgcccgccgaataaccacctctgtacaacagctcccacattgactctgcccaccgcttatttgcgacatttcccacctatcgacgggctttacagccggcccacttcggcagatgatttgcaccgctgcattccaccccaagcgagagaccccaccatgagcaaaaagccatccaagcatggccccaacaaggccaaatccatcatcgcccagcccttgttccgcagccgccaggaacgcgccggcaagggcaaaggcagctaccgccgcgaagccttccagtctaatagctgggaggcttcttactttctggctgcctgaaggcaagcgcccctctggcatgataaggtctgtacctgatttgtaacccctggacctgtgcatgccctctcgtctttctcgtcattggcacctgcgccaattgatcgctgcctccagcctcattctgcttgtcgcctgcgccgaaaaacctaccgctgcggacgctcaacccctgcccaagctccagacggccccggctatcgcgcccgccgtggttgccccattggcggtggacaatctcgacatccaaccgacccagacctttgccgaatggcaggctggcttccgcgctcaagcgctgcaggccgggatcactgcggccgtgttcgataacgcttttgccggcgtcacccctgatatggcggtgattcgcgccgaccgcagccaaccggaattctcccgcccggtgtgggaatacctcgacggagcactgtcgccggtgcgcgtgcgcaatggccaggcactgctggtcaagtacgccgatattctgcaaagcatcgagcagcgctatggtgtcgaccgccaggcgctggtctcggtgtggggtatggagagcaacttcggcgctttccagggcaataactcggtgatccgctccctggccaccctggcctatgaaggccgtcgccctgcctttgcgcaagcgcagctgctggcggcgctacagatcatccagcatggcgatatccaggctgaccagatgaaaggttcgtgggccggggcgatgggccagacccagttcatcccgaccacctacaacacccacgccgtggacttcgacggtgacggtcgccgcgatatctggaacagcccgtccgacgccctcgcctccaccgcgcattacctgcaaagctccggctggcagaaaggccagccgtggggcgttgaagtgcagccgctgccgtcgggcttcgactacagcctggccgatggcggcgtgcgcaaaacggtcgctcaatggctgcaactgggcatccaactgccgcctggcgtgagcctgccggcgaatgtcgaccaactgtccgccgccctgctgctgccggctggctaccgcggcccggcgttcctggtgctggataacttccgcgcgatcctcaagtacaacaattcgtcgtcctatgcactggcggttggtttgctgtcggagcgatttggcggcggcggtgtgattcgcggcagttggccaaaggatgagctgccgctgagccgttcgcaacgtattgacctgcaaacggcgctcagcgccaaagggtatgacgcgggtaatgccgacgggattattggcgccaacacgcgcaaggcgattcgggctgcgcagcaggcgctgggctggccggcggatgggtatccgacggtgaagttgctggaatcgctgcagaaccgctgaagtgatcgctcccacgctctgcgtgggagcgctgccttggacgctccgcgtcggcggctgaagagggtgacgcagagcgtcactggaggcattcccacgcagagcgtgggaacgatcaggccttgaacactacatcctgctccaacaccacccgctgctcccccgcatccaggcgcaccaaggcgcccatcggcaatgtcaggttcgggtcgcaatgcccactgcgccagcctgccagcactggcacgcacagcggctcaaaggtctgcttcagcagacgtgccaatgccccgctatccacaccagccacatcccctaccagcacaccggcgacctgagccagcttgccagccaggcgcaggtgggtcagcagacggtcgatgcgatagagcggttcgttgacgtcttcgataaacaggatgatgccgtcagcgtctatttcgtacggcgtgcccatgaccgcggcgatcatcgacaagttaccgcccagcaagcgcccacaggccacacctggctcgattgttgtcagcgggtaggccatcgggtgcggcaacacactgccggcgcccctttggccacgtagcaggctgaacaaggaggactcggtgggcggctgtttgccgccgagcaggtcggcattgagcatcgggccgtggaatgtcacaaagcccgcgtagcggttgatcgccaggtgcaaggcggtgatatcgctgtagcccacgaacggtttggggttggcacgcagcaggtcgaagtccagcgcatcgagcaaacggggcgtgccatagccgccacgcaggcagaggatggcatcgatgtcggggttggcgaaggcggcatgcaaatcgcgcaggcgcacttcatcgctaccggccaggtagccgtcgtgctcgtacaccccggggaaaatgtgcaattggtagccacgggcacgcatccattgcccggctttttcaacatccagcgcggcggggccggcgggggcgatcaggccgagggtgccttcggggcgcagtgcaggtacggcggcggtcatccatggttctccctatatgacgcagaacgaaatgtgggagctggcttgcctgcgatggcatcacctcggtgtcactgatacaccgagnnnnnnnnnnnnnnnnnnnnnnnnnnnnnnnnnnnnnnnnctcggtgtatcagtgacaccgaggtgatgctatcgcaggcaagccagctcccacacaagcccgcatttcacattgattctggagcggcttacgaaaccaggctcgccttgaccagcttggcctgctcgtcggcgtggtacgaagaccgcaccaacgggcccgaggccacgttcttgaagcccatcttgtagccttcctcggcgaaccaggcgaaggtgtccgggtgcacgaagcgctgcaccggcaagtggctgcgggacggttgcaggtactggcccagggtcagcatgtcgatgtcgtgttcgcgcatgcgcttcatgacttcgatgacttcttcgtcggtctcacccaggcccagcatcaagccggacttggtcgggatgtgcggcatcatctgcttgaatttctgcagcagggtcagcgaccactggtagtccgaacccgggcgcgcagccttgtacaggcgcggcacggtttccaggttgtggttgaacacatccggcggctcggcggcggtgatttccagcgccacgtccatacggccacggtagtccggcaccagggtttcgagcatcacgttgggcgacagcttgcggatttcgcggatgcagtcggcaaagtgctgggcaccgccgtcacgcaggtcgtcgcggtctaccgaggtgatcaccacatacttgagtttcaggtcggcgatggcgatggccaggctttctggctcgttgacgtccaatggcttcggacggccgtggccgacgtcgcagaacgggcaacgacgggtgcagatgtcacccatgatcatgaaggtggcagtgccgccagagaagcattcgcccaggttcgggcaggacgcttcttcgcatacgctgtgcaacttgtgtttgcgcagcagcgacttgatacggtcgacttccggcgaaaccgggatacgcacgcgaatccagtcaggtttcttcggcagttcggtggtcgggatgatcttgaccgggatgcgtgcaaccttctcggcgccgcgcagcttgacgccggcttccaccttggcacgcggggccggggctggacgctcagtgatgtccagcgtcgggatcatggtttgcacaacatcagtagtcatatcaatcgattccgcccgtcagggtcgtctgctctgcatagtcgaggtgtttgacgagctgcgcgcgcagccgggcacttacctcggcaaattctatggatgttgcatggtcactcaactgggtcatcgcaagcccggcgtaaccgcatgggttgatgcgccggaacggcgccaggtccatgtccacattcaaggccaggccatgaaaggaacaaccgtggcgaatgcgcagccccagggaggcgattttcgcgccatccacgtacacacccggtgcatcgggcttggccacggcggtcacgccgtaactggccaatagctcgatcaggcacgtctccatgcggctgaccaggtcgcgcacgccaaaccccagcttgcgcacgtccagcagcaggtaagccaccagttgaccgggcccatggtaagtcacttgaccccctcggtcgacctgcaccaccggaatatcacccggcagcagcaagtgctcggccttgccagcctggccctgagtgaagaccggcgggtgctccaccagccagatctcatccggggccgaggtgccgcgctcattggtaaagcgctgcatggcatgccagaccggctcgtaggccatctggccgagctcgcgaaagcccagaacgtgcgacatcacagcaccatgtgcacgaagccggtggcccgcagttcgctgttgatgtcgtagagctggtcttgaccagtcgcaacgatgtgcaactggatagtcgtgtacttaccggtggtgctggagcgctcatccacccggttatcgttgatcgtcgcatgtttacgcacgatctcaagaatcgtgtccttgcggcccacaccggtgtcgctgattaccttgataggataatccgtcacagggaattcaatttttggcgcttttacttctttatcggtcatggcagaacagcctcgtaagcgctaagccgtggcgacgggcaaagccccgcgttggatcaacgcggggctttgcaggtgcacacaatcagttgaacaagccgtagaagaatagacggatgctatcccatacgcggcggaagataccaccttcctcgacagcgtccagtgcgatcaggtcggcgctgtgcaccaccttgtcgtccagcttgacttcaaccttaccgatcacatcacccttggcgattggcgcaaccaattgcgggttcagggtcatgctggcggcgagctttttgagctggcctttaggcatggtcagggtcaggtcgtcggccaggccggccttgacttgcgaagtcgcgcccttccacaccggcgcggtcgccagctcagcacccttctggtagaaggtctgggtttcgaagaagcggaagccgtaagtcagcagtttttgcgtctcggccgcacgggcctgttcgctgttggtgccgaataccacggcgatcaggcgctggccatcacgtacggcggacgacaccatgcagtagccggcttcgtcggtgtggccggttttcaggccgtcgacggtcttgtcgcgccacagcaacaggttgcggttaggctgcttgatgttgttccagaagaactccttctgggagtagatcgcgtagtgcaccgggtcaacgcggatgatcgcgcgcgccaggatcgccatgtcgtgagccgacgaatagtgctctgggtttggcaagccagttgggttcatgaagtggctgttggtcatgcccaactcaccggcggttttgttcatcatgtcggcgaaggcgtcttcgctgccggcgatgtgctcggccagggcgacgctggcgtcgttaccggactggatgatgatgccgtgcagcaggtcgctcacggtgacttgcgaacccaccttgatgaacatccgcgaaccaccggtacgccaggcgttttcgctgacggtcaccgggtcgttctcgccgatctggccgcgacggatttccagggtcgcgatgtaagcggtcatcagcttggtcaggctggcaggcggcaggcgtacatcaccgccgttttcgaccagcacgttgccactggcggcgtccatgaggacccacgacttggcggccagttgcggggaggccggcaccatttcaaccgcccaggcggccggggtgatgatcagcgagataagcaggcacgtgcgtttggctaaggtggtgatgttcatccgtctctcgaaattgcttatggaaacttgccctcgcgggcaaaactattcagacagcccgcttccagactgtcacgtgttcggttgcctgctcaccccttgcccctgggtttttattgttcaacgagccaacaaccagggttcaagcgcgcaggcgcgcctgagccatcaaaccgttactgcttattctgcggtgaccacgctgggttgccccaggttggccaggcgtacgctgttctgcacttgcgccacttcgcttggcgagccgatcgggcccatgcgtacacggtgcaaggtttgctggttacgcacgatggagctgatgaagactggcgcgctgaccataccgctgagcttggaccttaacagttctgccgcatccgggttggcgaaagcgccgacctgcaggtattgcccgcccgccatcgaggcgcccggtgccgcgtgagggacgacgacggtatccggagcatgttgcgccggcggcggcgtccactgctcgatcttgccggtcgaggccgtcacttgcggttgcggggtagccggttcgttgagcatcaacggcgccggcttgccacgctgggcccagtactgcgccgggtcgatgccttcgactttgacccgtgcggtgccggtttcggcgtaaccgagtttcttggcggccgcgtaggacaagtcgatgatgcggtccgaatagaacggcccacggtcattgacccgaaggatcacggtgcgattgttgtccaggttggtcacgcgcacatagctgggcagcggcagggtcttgtgggccgcgctcatgccatacaggtcatacacttcgccgttagcggtgttctggccatggaacttggtgccgtaccaggacgcggtgcccgactgcacgtaggttttggattcctgcagcgggaagtaattcttgcccagcacggtataggggttggccttgtacgggccggtgtgcagggtcggcgtggcgtccgggatcttcgacacatccacatcccaccacggcgcgccgtctttgtgcgcgcggttgatgtccaggcccggctgggcgcggactactgcaccgcccgccttcttggccggcgcacggttaggggtggtggaacaactggctaccaacaaggacaacgcggcgaacgccaccagcttgagcggttttttgaacggcgatacccgcattacttgttgccccgtgcttgaaccagctcatctgacagctgatgcacggccatggcgtacatcacactgcggttataacgcgtgattgcgtagaaattcttcaggcccatccagtattcagggccatttgcaccttccaggcggaatgccgtcaccggcatgtcatcgcgtggcgcattctgactcgaccagcccagcgctcgcaactccccaacggtcttgaccggttcgataccttgggtcaggccttcgtcggcgcgctcacccgtgacatcggcgcggataaccaccggctcgccgccaacccaaccgtggcgcttgaagtagctggccacgctgccgatggcatcgtcggggttgctccagatattgatgtgcccgtcaccgtcgaaatccaccgcataggcgcgaaagctgctgggcatgaactgcggcaagcccatcgccccggcgtaggagcccttgaggctcagcgggtcgacctgctcttcgcgggccagcaacaggaattcgcgcagttccttgcggaagaactcggcgcggggcgggtaatcgaagcccagggtcgacaaggcgtcgatcacccggtagctgccggtgttgcgcccgtagaaggtttcgatgccgatgatcgagacgatcacctgggctggcacgccgtactcctgctcggcgcgagcgaggactgcctcgtgctggcgccagaaatccacgccgcgcgcgatgcgtgcatcagtgaggaacatcgggcgatagtccttccactgcttgacgcgttcggcgggccgggagatggcgtcgaggatcgcctgctttttctgggcttcacggaacacgcccatcagttgctcaccggcaaaaccgtagtcgcgggtcagctcaccgacaaattcggcaacctggggagagccatcgtagtcaccggcccgcgcctcttgcgttgcccccagcagcccgatcaggcccatccaggtcgcatgccgagtcgcccagccgcgcattacttgcattgacatcttcaccttattcaaacctgtgcgatccacttgcgatgcgtatgaatcgacatcaaaaccccaaacgctgacagcaatgtcaccagcgaagttccgccgtagctaatgaatggcaacggcaccccaaccaccggcagcaggccactgaccataccgatgttgacgaaaacgtaaacaaaaaaagtcatggtcaggctgcccgcgagcaatttgccgaacagcgtttgcgcctgggcagtgatcaccaggccgcgaccaatcaacagcagataaatcagcaacaacgcgcaaatgcccaccagcccgaactcctcgcccatcaccgcaatgatgaagtcggtgtggctctcgggcaaaaagtccaggtgggactgggtgcccagcaaccagcccttgccaaataccccgccggaaccaatggccgccttggactggatgatgttccagccggtgcccagcgggtcgctctccgggtcgaggaacgtgaggatccgttgcttctggtaatcgtgcataaagaagaaccacatggccactgccacgggcacggcggcggccagcacgctgaggatccagcgccagcgcaatccgcccatgaacaacacgaacgcgccaccggcgaggatcagcaacgaggtgcccagatccggctggcgcacaatcagcacgaagggcacgccgatcaggatcaggctaatcgccacatgcttgagctgcggcggcaaggtgcgcttggacaggtaccaggcaatggtggccggcatcaggatcttcatgaattccgacggttggaagcgaatcaccccggggatgttgatccagcgtgtggcgcccatggcgttgtggcccatgacgtccaccaccaccagcagcaacacgccggcgacatagcccaagggcacccagcgcgccatgaagcgcggctccaattgggcgatcaccaccatcgacagcaaacccaggccgaacgaggacgcctgcttgatcagcaggtcccagttcttgccgctggccgaatacagcacgaacaggctgccggccgccagggtcagcagcaggatcagcaaggggccatcaatgtgcatgcgttgcagcaacgtcgcacggcgacgcatcacatcttcactggagaggatgcggtcaaaattactcttcacgggccgtaacctcggggcttgaaggggggccgccatactcgggcttgagccggccatcgtcggccagcagccaggcgtccatcacctggcgtaccactggggcggcgacgccggagccggactcgccgttctcgaccatcacggccaccacgattttcgggtcttcggccggggcaaagccgacaaacaaggcgtggtcgcggtggcgttcctgcaccttggagcggtcatacttttcgccctgcttgatcgcgaccacttgagcggtaccactcttgccggcaatgcggtattgagcgccaattgccgctttgcgcgcagtgccgcgagcaccgtgcatcacctgctgcatgccgtggttgaccttggcccaatcggacgggtcacgcagcacgatgtccggaatcggattgtcgtccaccggcttttcgccttcgatggtcctggccaggtgcggtcggttccacacgcctttgttcgccaccagcgccgtggcctgggccagttgcagcggagtggcctgcatatagccctggccgatacccaggatcagcgtttcgccagggaaccacgcctggcgacgggtcgcacgcttccactcccgcgacggcatcaggccgggtgattcttcgaacatgtccagggagactttctgaccgaggccgaacttgcccatataggcagacagccgatcaatccccagcttgtgggccaggtcgtaaaaataggtgtcgttggagcgcatgatcgcggtatccaggtcgacatagccgtcaccggagcggttccagttacggtacttgtggtcgtagttggggagcatgtaatagccagggtcgtacacccggcttgaggccgtgaccacgccagcatccaggccggcaatcgccaccgccggcttgatggtcgagcccggtgggtacaggccgcgcaacacacggttgaacagtggccggtcgatggaatcacgcagctcggcgtaggccttgaagctgatgccagtcacaaacgggttggggtcgaagctgggctggctgaccatcgccagcacttcgccagtcttcgggtccagcgccaccacggcaccccgccgaccgcccagggccatctcggcagcttcctgcaacttgatgtccaggctcaggacaatgtccttgcccggcaccggatcggtgcgcttgagcacgcgcaatacgcggccacgcgcattggtctcgacttcctcgttacctacctggccatgcaactcggcctcatagaagcgctcgatgccggttttgccaatatggtgggtgccgctgtagttgatcgggtcgagggttttcagttctttctcgttgatccgccccatgtagccaacggagtgcgcaaagtgcggcccttgcgggtaatgccgcaccaactgcgccaccacttccacacctggcaggcggaactggttcaccgcaatgcgggcgatctgctcttcggtcagctcgaacagaatcggcaccggctcgaacggccggcgcccctggcgcatgcgtttctcgaagaccacccggtcttccggcgtcagttgcagcacctcaacgatgacatcaaggacctgcttccaatcgccggagcgttcacgggtcatgctcaggctgaagctgggccggttatcggcaaccaccacgccattgcggtcgaagatcagcccacgggtcgggggaatcggctgcacatgcacccggttgttttccgacagcgtggagtgatagtcgtactggatcacctggaggaaatacagccgcgcaatcagcacgcacatcagcaccaccaccaaaacagcaccgaacaccacccgcgcgcgtaccagacgtgcgtctttctcgtggtccttgatgcggatcggttgggtcatcgggggcggcgcagactatttgtggtaagggtgcccggacaggactgtccaggcgcgatacagctgttcaccgatcagaatccttaccaacgggtgcggcaacgtcagcgccgacagcgaccagcgctgatcggcccgcgcacagacttccggcgccagcccttccgggccgccgaccatgaaattgaccgtgcgcgaatccaggcgccagcgatccagttccaccgccagttgctcggtgctccagggcttgccgtgcacttcaagggtgacgatgcgctcattggggccgaccttggccagcatggcttcgccttcctgacggataaagcgcgccacgtcggcgttcttgccccgggtattgagcggtatttccaccagctcaagcgacagctcagcgggcagacgcttggcatattcgtgccagccttcttccacccacttgggcatgcgtgaaccgacagcgatcagacgcaggcgcacagccgttccttattcctggtctttgttgagcttgtcgaagtgcgcgtggcccacttccgggctgtggtgcttgccatcggcggcacggctctgctcggcgcctttccacagacgttccaggtcgtagaactggcgagcgttggaggtcatcatgtgaacgatcacatcgtccatgtccagcagcacccagtcgctgtcgcccttgccttcttcacccagtggcttgacgccctgggctttgacggcttcgcgaaccttgtccagcatcgcgccgatctggcggttggaggtaccggtggcgatgatcatgaagtcggtgatgctctgcttgtcgcgcacgtccagcacctggatgtcctgggctttaacgtcttccagggcagccacggcgactttcaccagctcttcgccagccagttccgggccaacatgggcttcaaccggcagcggtgcgcttttgaaggtgcctttgcgcttaactttgcttacgtctttgttcgtcatataaaactcgttttgctcgtatgttcgggcgcttgctgcacggttcgtgcgttcaagcgcgccttttcagttcgacgcacggtaaagcccgtgcgcatcgatgtaggccaggaccgcgtcaggcaccaggaaacgtaccgacttcccgctggccagcagttgacggatctgggtggcagacaccgcaagcggggtctgccagacgaatgcaatattcccgttcggcccggtcagggccaaggggtcacttaccgaccgcgcggccagcaggttgcgcaaggcatccggcggttcgctgtcggcatccgggcgttgcaaaaccaggatgtggcaatgctggaggagttcctcccagcggtgccaagagggcaggccgcaaaatgcgtcccagcccaaaagcagaaacagtgggtcatctgcggccaattcggcgcgcatcagctccagggtgtcgatagtgtaggacggtttatcgcgcttgagttcgcgatcgtccaccaccagcggcgatataccttctacggcaacacgcaccatttccaggcgctgctctgcggccacctgcggcgtgtcgcgatggggcggccgaaaattgggcagcaggcgcagctcatccagcgcaagggcatccgcaacttccagggcactgcgcaaatggccgatgtgcacggggtcgaaagtaccgccgagcagcccgatgcgtttagtcatcaagtgcgcacatgaccgtcgccaaacaccacgtacttctcactggtcagcccttccaggcccaccgggccgcgtgcgtggagcttgtcagtggaaataccgatctccgcccccaggccgtactcgaagccgtcagcaaaacgcgtcgaggcgttgaccatcaccgaagcggaatccacttcgttgaggaaacgccgggcatcgctgaaatgctcggaaacgatggcgtcggtgtgcttggagccataggtattgatgtgttcgatggcctggtccaggtcatcgacgatgcggatcgacaggatcggggccgtgtactcggtgtaccagtcctgctcggtcgcctcgatgacgtccgcgcccagcagcgcacgggtgcgctcgcaaccgcgcagttctaccgacttgtcacggtagatggcggccagcggcggcagcacgcgctcggcaatgccgacgtgcaccagcagggtttccatggtgttgcacggcgcgtagcggtgggtcttggcgttgtcggcaatgcggatcgccttgtcgaggtcggcggcgatgtcgatgaacacatggcagacgccgtccagatgcttgataacgggcaccttggcatcgcggctgacgcgctcgatcaggctcttgccaccccgcggcacgatcacgtcgacgaattccggcatggtgatcagcgcgcccacggcagcacggtcggtggtttccaccacttgcaccacttcagccggcaactcggccacggccaggccctgctggatgcaggcggcgatggcccggttggaattgatcgcctcggaaccgccacgcaggatagtggcgttgcccgacttgaggcacaggctcgcggcgtcgatggtcacgttcgggcgcgactcatagatgatgccgatcacgcccaggggcacgcgcatcttgcccacctggatgcccgacggcaggtagcgcatgtcgcgaatttcaccgatggggtcaggcagcttggccacctgacgcaggccttcgatcatgtcgtcgatacgtgccggggtcagcgccaggcggtccagcaaggctggctccaggccattggcgcgcccattggccaggtccagttcgttggcggcggtcagctcggagcgcgaagcatccagagcatcggcagccgccagcagcgcacggttcttctgcgcggtgctcgcacgggcgatcaaccgcgaggcctgccgggcagcgcgacccaggcgggtcatatagtcaagaacggactcagtcatggtcagggagtcttggcaaagaggaaagcggcagattatagctgtgacgccgcccgactgacagcggtgaggggcggatggtcgaaatgaactgtaaaaaccccaggttcaggcgtaattaaggtgagagttgttatgattcggtcacatttagccgtatctacccttgaccgccatgcccgacttttcgcccctgctccccgccagccccctgcccgatagcttcttcgaccgtgacgcccagctgcttgcgcgcgaattactcggaaaagtcattcgccatcgcgtgggcgatctctggctttcggcgcgaattattgaaaccgaagcctattacgtggccgaaaaaggcagccacgcctcactcggctacacagaaaagcgtaaggctttgtttctggatggtggccatatctacatgtactacgcccgtggcggtcattcgctgaacttcagcgcccatggcccgggcaatgccgtgttgatcaaatcggcctatccctgggtcgacgacatttccggcgcggcgagcctggcacagatgctgttgaacaaccccaaccccgatggcagcccacgcccctcgcaaaaactgtgtgcgggccagacgctgctgtgcaaggccctgggcctgaaagtgccgatgtgggatgccaagcgcttcgatcaggaactgctgtatgtcgaagacgtaggccaggtgcccacgcagattatccagaccacgcgcctgggtatccccagcgggcgcgatgagcacttgatgtaccgcttcgtcgatgctggctatgcgccttattgcacgcggaacccgatgcgtcgggggcaggtcgaaggccgggattattttttgatttaacgcgcgacacatcccatgtgggagctggcttgcctgcgatagcggtgtgtcaggcaactttcatgctggccatgccgcagccatcgcaggcaagccagctcccacagttgaatttcaccgcctcaaattctgttttgtatgcatggagtggattgtatgggccaatggctcgatagcatcaccggctggttgaccctcaacccacaatggctggcagcggcggtgtttattgtcgcgtgtgtggagtgtctggcgattgccgggttgatcgtgccaggcacggtattgctgtttgcaatcgctgcgctggctggcagcggtgcgctgtcgctgagtgaaaccctgctgctgggcttcctcggtggcttattgggcgacggcgtttcctattatctgggccgccatttccatcagaacatccggcgcctgcccggcctgcgccagcatcctgaatggatgaacggcgcagaaacctacttccacaagtacgggattgccagcctgttggtcgggcgtttcatcggaccattgcgccctatgctgccgatggtggcgggtatgtgcgacatgcccttcccgcgcttcgccgccgtgagcatcattgccgcagcgggctggaccgtggcctatctgctgccgggctgggctgccggcgccgcgttccgcctaccgttgccggaaggcttctggccggaagcggcgattatcgcggcgtgcctggcggtgctgctggggctgagtttgaacagcagttggcgcgggcatcggcgcgccaccttgtggatcggttgcgccagcctggtgttgttaatcgcgttgtttatcggctatccccacctcaatgacttcgaccagggcctgagcgccctggtgcaagagcatcgcagcccgtggctggacgaagtgatggtacgggtcacccaactgggtgagttcaagaagatgttcttcgccagcgcggtgttcactggcctgttgctgttggcacggcagtggcgccacgcggtgtttgtcggcgccaccctcgctggcgcggcagtgatcaacaccggcaccaagctgtttttcgcccgtggccgcccggaaatcctcaccgacccgctgaccagcttcagcatgcccagcggccatgcctccggtgcttttgccttcttcctggcgctcgcggtattggccggtcgcggtcaacccacgcggctgcgcctgacctggatgctgctgggctgcattccggcggcgttcattgccttgtcgcgggtctacctgggcgcccattggcccacggacatcctggccggcacgttgctggccatgaccgtatgtgcgttcagcctgacggccatccagtaccgcagcccattgccagccatgtcgcaaaaagcctggtggctggtgctgcccgccgtggtggccgtgctcggttttatcgcctttaccggcacgccccacgccctgctcaggtacgcctactgacccttggccgggccgatccagtccacggaggcgctgcgccgttcaacgcaacgttcgcggcgctccagtaacatctcatcagccacttcggcggcgcgctcggcgatgtactccgcgccccgcgtggcttgctgctggagtaattgcgtggtcacgctgacaaaataagcgtcccacgccacttgttccgagggtgtcagccgaatcatggttctctccgatcattgttgtgtgatcggaaaatagtgcaggcgacaccgtggagacgaccgagcaaagtctgaaagctctgtcaggcaaatccgaacctcaggtgaacagctcgccctgcagttcatcgagcaacatctggatcgcatccagccgttgctgtgggtcgtccagttgcagcaagtcgattttgtcggcctcggtaaacggcagcagataggccaaccggttgcccagggcttgctggccttcgacgtcaccgcccatgtccagcgaagccaccatcgggtgctcggccagggcctcaagcaacgccagcaagtcggcgtcttcttcgcccagcggctggtccggcaactcttgcagccattgcacgtcggccaccagcaactggtctttttgcacgccagcttcacgcacgcggaaacgacggccaccttcgacgcgaatgcccagcaggccgttctcctgctgtttgaagtcacgaatcagcgcttcacaaccgacaagcgcataaccgtcaggggccgcgcccacctctgagccatccaggatgcacaccacaccaaagccttcgccctttttcatgcaacggccgatcatgtccaggtagcgcgcctcgaatatctgcaggtcgagggtgcagcctgggaacagcacagtgttgagggggaatagcgccagactcataacggtttccttaaaacctggtttaaacaatgaccgacaccgccaacggcaggaacaccgccgtggccacgcccatcaaactcatggccagcgccgcgaaggcgccgcattcttcgctttcctgcagggccaccgaagtaccgacggcgtgggcggtcatgcccaaggccatgccgcgcgcttcggggctgcgtacacccaggcgcgtcaagagcgctgggccgatcatcgcgccgaccaccccagtgaacaacacaaacaccgccgccaaggccgccacgccgccgatctgctcggccaccagcatggcaatcggcgaggtcaccgacttgggcgccatggtcatcagcaccctgtgctcggccccgaaccaccaccccaacgccacacacaggccagtggccaacaccccgcctaccaccagcgtagtaaaaatcggccagaacaattgccgaatccgtcgcaggttcagataaagcggcacggccaaggccacggtcgcaggccccagcaggatgcccatgatctcggtgctcttgcggtattcggcgtaactcaggccgcaggtgagcagcacgccaatcaccagcaacatcgacaccagcaccggctgcaggaagatccagcgggttttctcgaaccccgccagcaccagttgataggcgcccagggtaataccgataccgaacagcggatgatgaatgaccgccgtccaggcgccctgccagtcaaggatcattggtccttctcctttcgcttgaccatctgctgcatcagcacaccgacaaagcccatggcgatcaccagcgacaacaccaacgccccgacgatggcccagaaatccgccacgatgtctttggcatacaccatcactcccacggccggcggcaccagcagcagcggcaggtaacgcaacaggctgccggccgccaggctcaggggctcgccgacttcaccgcgccagaccagaaagcccagcatcagcaacaagccgatgattggcccaggcagcaccggcaccagcaaatgattgatcgcggtgccgatcagttgaaacagcaccagccaagtcaggccacgtaacagcatcccgctctctccccctcaaatcccgcgcgcattataagcacgcccgccctatgctccggcattcgccaaaagcatgttgggttgaccgggctgattgcccgtgatgatctacagtggttctctgcaaccaaaaaaaacgccccttatcaacgggcacataagtgatgaaccaaggagagacgcaatgccctatgtacccgtagcgcagctcaaagattacgtcggcaaggaactgggacgttccgaatggctcaccatcgaccaggcacgtatcaacctcttcgcggaagccaccggcgatcatcagttcatccacgtcgacccggtcaaggccgcgcaaaccccgttcggcagcaccatcgcccatgggttcctgtcgctgtcgctgatgcccaagctgatggaagacatcctgatcatgcccgaaggcttgaagatggccgtcaactatggcctggacagcgtgcgctttatccagccggtgaaagtgaactccaaggtgcgcctgaacgtcaccctcactgacgtcaccgagaagaagcccggccaatggctgttcaaggccaccgccaccctggaaatcgaaggccaggagaagccggcttacattgccgagtcactgtcactgtgcttcgtataaccaccacacccccactgtaggagcgagctagctcgcgaaggccgtcaacgataacgcgtgctggctgaataaatgcggcgcctgtgagtttttcgcgggcaagcccgctcctacaggtaatggatcctgcacatagaccactaggttcggcaccccggctacggcatactcggcgctcaattatccggatcccgctatgcgcccactcgctccccttgcccttgccctgttgctcaccgcttgcggagacggcgaatcgctgttgccgcccgatgcgcgcctgcccgatggcggccgctaccgtggcgatgtggttaacggcttgctgcaaggccaaggccgtgtggactaccccaatggcagctggtacgccggccagttcgacaaaggccagtggcacggccagggcgaatggcatggcagcaatggcgaagtctataaaggcgaattcaagcagggcctgtttgatggccagggcagcctgaccacttcgggcagcagctacgtgggcggcttcaaaaacggtcgacgcaacggcgaaggcaccctcaaagaggggcagatgacctatcgcggcgaattccaggacgaccagtactcaggcctcggccgcctggagttggccgacggcagccagtaccagggccagttcgcccacggcaagcccaatggcgaaggccagcgcaatgacgacagtgacaaccagttcagcggccgttttgtcgatggccaactggaaggcaatggcaccttcaacagcgccgagggcgatatctatgtcggccaattcaagcagaaccagctcaacggcaaaggccgctatgagaacgccgacggcgatgtgtggatcggccagttcaaggaaggcgcgctgaccggaagaggcgaattgatcggggtcgatggcagccactatgtcggccagttcagtgactggcgctttaccggcgaagggcgcctgaacctcaccgatggcagtttctatatcggtggcttcgacagcgacaactatcaaggccgtggcacgctcgtcctcaccgacggcaccgtgcagtccggcacctgggtcaacggcctgcgcgtgcgcgacgccgagggcaagctgctgcccgacccgttggagaccggcatactggcccaaggccgcttgctcgacgacgccctggcggccgtaccggcgtccaccccggccgtggagctgtactccttggtgctggcgggcgacggcaagcaaagcgtgttcttgcgcgaggccgattacgtcagcaatctgcttgccacccgctttggtgctcgcggacaggtgcgcctggtcaaccaccgcgaccacatcgccgaccgccccctggccactcgcgaaagcctgcgccgctcggtacaaaccctggccgaacggaccgggccggaagacctggtgttcatttacatgaccagccatggcacccatgagcatgaactggtgctcgaccaaccgcgcatggaactggccgacctgcccgccgatgagctggccgctgtgctcgcaccactgaaaaaccgtgacaaggtcatcgtgatctccgcgtgttactccggcggcttcatacccgcactcaaagatgagcgcaccctgatcatgaccgcctcccgcgcggaccgcgtgtcgttcggctgctcggaagaagcagacttcacctacttcggggatgcccttttcgcacaagctttcaaccaaacggacgatttgcaacacgccttcaaactggcacaactgcacgtggccgaacgcgaacaggcggacaatttcgaagcctccgaaccgcagatctgggcgcctaagggcgtgatcgcccattggcaattattacgtaaacagcaggcacgaaaggcgctcgaaagcgtctcaatgaatagcaaggaagccaaaggcaactaagctgtaacgtgtaacaagggggaaacaccatgtacctgacaccgcagcatatcttgctggccggggcctccggcctcactggcgaacacctgctcgaccgcctgctcaacgaacccaccgtgacccgcgtgctggcacccagccgcaaaccattggctgaacatccacgcctggaaaacccggtgggcgacccggcggtgttcctgccgcaactgagcggccgcgtggatattgccttctgctgcctgggcaccacgatcaaaaaggccggctcggaagcggccttccgtgcggtcgacctggacatggtggtggctttcgccaagcgcgcacgggaactgggcgcgcggcatctgatcgtgatcagcgcaattggcgccgacccgaaatcctcggtgttctacaaccgggtcaagggggaaatggaactggcgctccgagcgcaagactggccgcagttgaccatcgtacgtccgtcgctgctgctgggcgaacgactggagccgcgcctggccgagcagttagccgggcctttgtcacggcttattccgggcaagtaccacggtattgaagtctgcgaactggcccgcgccatgtggcgcctggcgctggaagaacaggatggcgtgcgggtggtggagtcggacgagttgcgcaagctcggcaagtaatgatgcaggtctggtactgatcgttcccacgctctgcgtggtaacgccggttatgacgctctgcgtcatgcttgggacgcggagcgtccccgactgcattcccacgcggagcgtgggaacgatccaacccaggcagccactgtcttacagcccgcccgtagcgttgaagcccacacccagcaccgtcaacaccgacagtggcaacaacaaagtatcgagcaacgcactagccggcaggtcgagatggggatagctcggggcctcggcaccaaagcggtccttggcgcagcagccaccattgatcgcgtacagatccagccgcgtgccggcatacaccaccggtgcgcccgcttgcgccgcatccagcgtgcgcgccgtggcgcagccggtaagttgcagcgccatcaacagcagcagcgctttattcatcgccgcccagatggtgctcaccccaacgcggcagcatgtcctggggaatgttcaacaggttgagaatgcgcgccaccacaaagtccaccaggtcatcgatggtctgcggctggtgatagaagccaggcgacgcgggcagaatggtcacgcccatattcgacaacttgagcatgtgctccaggtgaatgctcgaatacggcgcttcgcgcggcaccaggatcaattggcggcgctccttcagggtcacgtctgccgcccgttcgatcaggttattgcaggcgcccgtggcaatcgccgacaaggtgccggtggaacatggcaccaccaccatcgccgccggcgcaccggagcctgaagccaccggcgacatccagtcctctttgccgtagaccttgatctgccccgccgccgcaccggtgtactcggtaaggaacgcctgcatcgtctgcaccttggacggcagcgcgacatcggtctcggtcgccagcaccaactgcgccgccttggagatcagaaaatgcacctcacggtcttcacgcaccaggcaatcgagcaggcgcaggccatagggcgcaccggatgcgccggtcatcgccagagtaatgcgttccggcccgctcatttcagtgcctcggccagcttgccgtgcaggccgccgaagccgccgttgctcatgaccaccacgtgcgtgccgggctgggccaaggacttcacctgctcaatgatgccttcgagcgaatcgcagactgtcgagggtacggtgcacagcgcagcagtcgcgggcaaatcccagccaaggttggccggtgcataccacaccacctggtcggcatcgttgacgctttcaggcaggccatcacggtgcgcgccgagcttcatggagttggaacgcggttcgacgatggcgatgatctgcgcatcgcccacgcgcttgcgcaggccatccagggtggtggcaattgcggttgggtggtgggcaaagtcgtcgtaaatggtaatccccttcacgtcggcgactttctccatgcgccgcttcacactcttgaatgcgctcaaggcggcgatgcccatggccggcaccacgccgacatgccgagcggcagccaggctcaccaaggcgttggccacgttgtgctggccagtcatgccccagtcgacgatgccttgggcctggccttcgaacagcacttcaaaccgcgaaccgtcgtcgctgagcaacctggcctgccactgcccacccgcgccggtagtttgcaccggggtccagcagcccatgtcgatcacacgctgcaacgcaggctcggtggtgggatgaatgaccaggccttcactgggaatggtgcgcaccaagtgatggaactgccgctcaatcgccggcagatcggggaagatatccgcgtgatcaaactcaaggttgttgaggatcgccgtgcgcgggcggtagtggacgaacttggagcgcttgtcaaaaaaggcgctgtcgtattcatcggcctcgatcacaaaaaacggtgtctcacccaggcgcgccgacaccgagaagttctgcggcacaccgccaatcaggaagcccgggctcatgcccgcatgttccagcacccaggccagcatgctgctggtggtggtcttgccgtgggtacccgccactgccaggacccaacggccttgcagcacatggtcggccagccactgggggccggagacgtaaggcaagccattgttcagtacgtattccaccgccgggttgccgcgcgacatagcgttgccgatgacgaccaggtccggcaccgggtcgaattgcgcggggtcgtaaccttgggtcagctcaatcccttgcgcctgtagctgcgtgctcatgggtggataaacattggcatcggagcctgttacgtgatggcccagctctttggccagaaccgccatcgaacccatgaacgtaccgcagatacccagaatatgaatgtgcatagtcgacctcgtaaacatcgaggcaggttagcgtagggtgggaaagttcgcacgcattagctgagggcgaaacgcccgccggtaggatccggcgggcaaaagggatgacttaaaccttggtgcccgcgttgttaagctcagcgcctttcaaggtcatgattcggtcagcggtttttttcaaggcgtggtaccgacgctcgatcgcgcctaagcggccaccggtaccaggggacgtttgcgactcgacgtgaggtttgaaaatcagctcgttgtcctcggccagttgtttcatatgggtttctgaaacgtccagtaactgctcaaggttactcatgcgtgcgccgcgctccttgggccagtcgtcgcccatgacaagccggtctccggtatttcccgccagcgtgatgatgagattggcaaactccaccatcactttttctatgcgatccagatggcgtgtggccccaggcgcaggctcatcgggtgtggatggcgtaacggctggcggcgctggcttctgatcggcctgcacaacgccaggcaaatgcggtggcggtggcgccactggcgacggtacgtattggcccttgatcgcttcccccgcagccacggacccggcatatgcgcccacattgatcggcgcgctgaccatgccattgatgcctgcgttgatgaacgcgtccttaatcatcttgccggtagagggcgatgtagaaataacgcccgccttgaccagcctgtcggcatccaacagccgctgggtgacatcggccacactgaccttgggcgattccgccggcttcaaagggatggtcccaccgacagggggtgtctgaggccccttggtcagcgcgtccttgagcttactggcagtcgactggcctgaactgcccgcggtcacactggtgccagggatgacctcgtttgtcgtcggttttttccctcccgccggggtttggggccgggtgggcgtgggactgaccggggcaggcggtaccctgggcgacggcgtaggcgacacgggaggcgtgtgccgggacccgcccccgaatatccggccgaagattccacgcttgacgcgcacctttggcgtttgatctgcctgcggctcagacagctgcgtgccaggctcaggctcaggctcaagggggtgcatcggttcgccccagcccgccattaagggttgcggtgcagacgtgggcgtaacatcaagttgaacagggagttgtggcacaggagtcgttattggacttgtaatattcatgtgttgtcaccctagaagtttcaaacaacggtgtttaagggcaagtgatgctctgcccttattccatcagtgcttaaaacaacgcgccacgttccgggacgacgtgagtgcgtagagcgataaaaaaccttaaatcacgtgggacgaaaaacaagtagttcgcaataactgagttattccgacaactgtcgcgcccctaatgcataacctcccgtgaaatcccatgtttgcgtaacttgcggtacagcgtattgcgactgacgcccaactgttcagccacatggctcatatgccagcgctgctgcgccaacgcgttgagtaatgcctggcgctcggcgctctccagcggcgaggcgcacggcgcatcccccctctccccctggggccgcacctgtcgaatcaacgccggcaagtcctcaagcccgactcgcccgccctcacaaagcgccacgactgtgcgcaacaccgtacgcaactgccgcaggtttcccggccaatggaatgccaacaaggcttggcgcgcaggctcgtcgagcatcacctgctcggtgcccgcctcttgggccaggaggaagtccaacagttgcgacttgtcagtgcgttcgcgcaacggcggcagcgccacttccaagccgttcaaacggtaatacaggtcttcgcgaaagctgccatcggccacacgctccagcaaattgcgatgcgtggcgctgatgatgcgcacgttcacagcttggggttcaccaccgataggcaccaccaggcggtcttccagcacccttaacaggcgggtttgcagcgccaggggcatgtcgccgatttcgtcgagaaacagcgtgccgccgtcggcctgctgcagcttgccgcgcatgccttctttaagggctccggtgaaactgccggcgcgatagccaaacagttcgctctcgatcaggttttctggaatcgccgcacagttcagtgcgacaaaggccttgtcgccccgctggctggattgatgaacggccttggcgaaggcctctttaccgcagccggtttcgccattgatcagcaatggcacgtcgcgctcgaacactcgcgaggccttgcgcagctcattttgcaacgtcgggtcgcccaggcagatacccaaaggccgtggcgcctgcggcttgacgaacggggcgggcgcactgcgcggctggcctcgcagcgctgcaaatagagggcgaccatcgcgggtacgcagcggccaactggccgtggcattggcgctggcccgccccagcaactggtccagggaacagtcgaaaaacgcttccaccggctggcccaccaaaccgccgcgcaactgccccaacaggttcaaggcgctctggttgaccgcacaaatgcgcccttcgccatcaaacgccaatagcccttcgctgaacaacccgaccgactcggcctgcaggtgaaaacgcaacagccagtggtgttcgaagtggcgcaggaagtagcaactttcgatcatcttggccgacaggttcaccaacgccatggtgtggaactggctctggcgcgacacggcttcgcgggccgaagacacatccagcaccgccagcaattcaccatgaggatcgaacaccgggctcgccgaacaggtcagcccggtatggcggccgcgaaagtgttcgtcacggtggatcgtcaacgactgccgttctaccaggcaggtgccgatgccgttggtgccttcgcaggcttcgctccagtcagcgcccagccataagccagcgcgctcgaagatcttgcgctccgacggcgcggtgacacagttgaggatcaccccacgcgcatcggtgagcagcaccgcgtgaccggcgccggaaagctgttgatgcaggctgttcatttcgctgccggcgatgtgcagcacttggcgcaggcgctcgcgactttccagcaggcgcccgtgttcgagcacggtgggcgcgatggtcagcgccgggtcgaggtggtagtcctccacacagcgcagccaggagcgggcgatggacggggcgctgcccggcccctgggaaagctcttggccccgggtgacggtcaagacttgctgggcatggcgactgaaatgatcgttatgcatgttcttattattctccctgcgtgagaacgcccagcatcccccagccatccggccattgcaatcccggcccgacccaccggtcacaggctgtaccatttatggcacaaactgtcaccctggctgtaccaccgctgtcacgggaacgccttgcaacaaagcccaaccccctgattttgctggcccgcacagcagtggcccaacctttgctctacgctttataacgcgcttgccgcgctgtactccaataaacataaaagcaggagatgcccaccatgcgttatgcacaccccggtactgaaggcgccatcgtttcgttcaaggccaaatacggcaactacatcggcggcgagttcgtggcgccggtcgatggcaactacttctccaatacctcgccggtcaacggcaagccgattgccgacttcccgcgctccaccgccaaagacatcgacaaggcgctggacgccgctcacgcagccgccgatgcctggggcaaaacctcagcccaggaccgctcgctggtgctgctgaaaatcgccgaccgcatcgagcaaaacctcgaactgctggccatcaccgaaacctgggacaacggcaaggccgtgcgtgaaaccctcaacgccgacatccccctggccgccgaccacttccgttacttcgccggctgcatccgcgcccaggaaggcagcagcgcagaaatcaacgaactcaccgccgcctaccacttccacgaaccgctgggcgtggtcggccagatcatcccgtggaacttcccgctgctgatggccgcgtggaaactcgcgccagccctggccgccggtaactgcgtagtgctcaagcccgccgagcaaacgccgctgggcatcagcgtgctgatggagctgatcggcgatctgctgccaccgggcgtgctgaacgtggtgcacggttttggcaaggaagccggcgaagccctcgccaccagcaagcgcatcgccaagatcgcctttaccggctcaacgcctgtgggctcgcacatcatgcatgcggcggccgagaacatcattccgtccacggtagagttgggcggcaagtcgccgaacatcttcttcgccgacatcatgaaagcggaacctgcattcatcgaaaaagccgccgaaggcctggtgctggcgttcttcaaccagggcgaagtgtgcacctgcccttcccgtgcactggtggaagagtcgatctacgaagacttcatgaaagtggtgatgaaaaaggtcgagtcgatcaagcgaggcgacccgctggacaccgacaccatggtcggcgcccaggcgtccgaacagcagttcgacaagatcctgtcctacctggaaatcgctaagggtgaaggcgcgcaactgctcaccggcggcaaggtcgagaagctcacgggcgatctggccaccggttattacatccagccgaccctgctcaagggcaccaacgatatgcgtgtgttccaggaagaaatcttcggcccggtggtgagtatcaccaccttcaaggacgaagccgaagccctggcgattgccaacgacaccgagttcggcctgggcgcaggcctgtggacccgcgacatcaaccgcgcctaccgcatgggccgggccatcaaggctggccgcgtgtggaccaactgctaccacctgtacccggcgcatgctgcgtttggcggttacaagaagtctggcgtgggccgtgagacccacaagatgatgttggatcactaccagcagaccaagaacttgctggtgagctacgacattaatccgctgggctttttctaactcagccttatagcaagcaaccagttcccaacttgaaacgcaatcaagtgtgggagctggcttgcctgcgaaggcggtgtctcagccaaataagggctagctgacaggccgctatcgcaggcaagcctgctcccacatttgatatcacacgcaattgctacctcgttcggcacacagacgccgagtcaaaaacaataagaatggaaggtacttcccatgcctagcgaacccactggttcttctgtcgacttcgaaaaagtcggtaccgattattttcaacaacgcgaacttaaaaaaggcgccgccggctgggtattactggttggcctgggcgtcgcctatgttatttccggagactacgccggctggaacttcggcctggcccagggcggttggggcggtatgttcctcgctactttgctgatggccaccatgtacctgtgcatgtgcttttccctggccgaattgtcttccatgatccctactgctggcggtggctacggttttgcccgcagcgctttcggcccctggggcgggttcctgaccggcactgccatccttatcgaatacgccatcgcgcccgccgccatcgcggtgtttatcggcgcctattgcgagtcgctattcggcattggcggctggatgatctacctggcgttctacatcatctttatcggcatccacatttttggtgtgggtgaagccttgaagctgatgtttgtgatcaccgccgtcgccgcgatcgccctaggcgtgttcctggtgtcgatggtgccgcacttcaacgtcgccaatctgctcgacatacccgtgaccgaggccaagggcgccagcagcttcctgccgttcggctacgtcggcgtgtgggccgcgatcccttatgccatctggtttttcctggcggtggaaggtgtgccgctggccgctgaagaaaccaagaaccccaagcgcgacctgccgcgtgggctgattggcgcgattgtggtgctgaccagttttgccctgttgattctggtgatcgcgccgggcggtgcgggcacttatgcgctgatcaaatccggcaacccactggttgaagccttggcgttgtcctacggcggttccacgtggatgggcagcttcgtcaacctggtcggcctggccggtttgatcgcgagctttttctcgatcatctacgcctattcgcggcagatctttgccttgtcccgtgccggttacctgccgcgcaaattgtccgagaccaacaagagcaaggcgccggtattggcgctggtgatccccgggattatcggctttggcctgtcgctgaccggccagggtgacttgctgatcctggtggcggtgtttggcgccacgatttcctacgtattgatgatggccgcccacatcaccctgcgcatccgtcgccctaaaatggagcggccataccgcacgcccggtggcatcttcacctcgggcgtggcgctggtgctggcctgcgtggccgtggtggcgggctttctggtggacccacgcgtggtgattggcgcggcgatcatctatggagtattaattgcttactttgctttctacagccggcatcacttggtagcaggcacgccggaagaggaattcgcggcgatccaggccgcagaggccgccctgcactaactgccgaaaacctcgacgcggcgccttgcccgcagcaggcccgcgtcatcaaggagacactgtatggcaagcttttcccacgcggtaggtgctcaaacctaccgcttcgacagcctcaaggacgtgatggccaaggccagccccgcacgctccggggacttcctcgccggtgtcgccgcgcagaatgacggtgagcgtgtggcggcgcagatggcgctggcaaatatcccgctcaagcacttcctgcaggaagcattgattccttatgaaagcgatgaagtcacccggctgatcatcgacacccacgataaacaggcgtttgcagcggtcagccacctcaccgtcggcggcctgcgcgactggctgctcagcgacgcggccgatgaacaggccctacgcgcattggcgccggggctgacaccagaaatggccgcggcggtgtccaagatcatgcgcgtgcaagacctggtgctggtggcgcaaaagatccgcgtggtcacccagtttcgcggcaccctgggcctgcgcgggcgcttgtctacgcgcttgcagcccaaccaccccaccgacgaacccgctggcatcgccgcgagcattctcgacggcctgctgtacggcaacggcgacgccatgatcggcatcaacccggccaccgacagcatcgcctcaatctgcgccatgctggagatgctcgacgcgattatccagcgctatgagattcccacccaggcctgcgtgctgacccacgtcaccacctccatcgaagcgatcaaccgcggcgtccccctggacctggtgtttcagtcgattgccggtaccgaagcggccaatgccagtttcgggatcaacctcaacgtgctgcaggaaggttatgacgcgggcttgagcctcaagcgcggcaccctgggccagaacctgatgtacttcgaaaccggccagggcagcgccttgtcggccaatgcgcactttggcgtcgaccagcaaacctgtgaaacccgtgcctacgccgtggcgcggcacttcaagccgtttctggtgaacaccgtagtcggctttatcggcccggagtacctgtacaacggcaagcagattatccgcgccggccttgaagaccacttctgcggcaagctgctcggcgtgcccatggggtgcgacatctgctacaccaaccacgccgaagccgaccaagacgacatggacaccctgctgaccctgctcggcgtggccggcatcaacttcatcatgggcatccccggctccgacgacatcatgctcaactaccagaccacctcgttccacgacgccctgtacgctcggcaaacactgggtttaaaaccggcgccggagttcgagcagtggctggcgaaaatgggcatcttcacgcaggctgatggcaaggtgcattttggcaacagcctgccaccggccttccgccacgccttggcgcaattgggatgaaggagccgactgtgcaaccagaattgcctgacaacccgtggctggaactgcgccgcctcaccccggcgcgtattgccctgggccgcaccggcaccagccttcccaccagcgcccaactggacttccagtttgcccacgcccaggcgcgggacgcggtgcacctgccgttcgatcacgccgggctcagccaccaactggccgaacgtggccgagacagcctgttattgcacagcgccgccacggaccggcacatgtacttgcaacgcccggacctggggcgacgcctgagtgatgagtcagcgcgaacccttcgcgactacgcttcggcccagcctggtggtgtggacttggccatcgtggtagccgatggcctgtcggcactggcggtgcataaacacacagcgccgtttctggcgcgcctggaagaacagacccacgccgaaggctggtccttgtcaccggtgatcctggtggagcaaggccgcgtggcggtggccgatgaaatcgggcagctactgggcgccaagatggtggtgatcctgatcggcgaacggccggggctcagctcgccggacagcctgggtctgtatttcacctacaaccccaaggtcggcctcaccgatgcctatcgcaactgcatctccaacgtgcggctggaaggcttgagttatggcatggcggcccatcgcctgctgtacttgatgcgagaggcgtgtcgccggcagttgtcgggggtcaatctcaaggatgaggcacaggttcagaccctcgaatcggacgacccggacctgatgaagggcaatttcctgctcagcccggcagatgaccgatagcggtacgattgcgctttttggcgtcattaggcagcatcgagtcacggccgctcgtgtggtcatacccatttggaagttgaggcctggcatgcggattactcaagcgaccctggaacacctggacctgttgaccccgttgttcgtcaaataccgcgagttctacggggccttgccgttcccggactcgtcacgggcctttttggaaaagcgcctgcggcgcaaggaatcggtgatttacctggccctggccgacgatgatgacaagcggctgctggggttttgccagttgtacccgagcttttcttcgttgtcgctcaagcgggtgtggatcctcaacgacatctatgtggccgaggacgcacgccggcaactggtggcggacaacctgatgcgcacggccaaaaaaatggccaaggacacccacgcggtgcggttgcgggtatcgaccagcagcgataacgaggtggcgcagaagacctacgagtcgattggatttcgcgaagacaccgaattcaaaaactacgtgttgccgatcaacgaagactgaaaaccagtcagccaaacaccgcaatactcttgtgggagctggcttgcctgcgatgacggagtgtcagcgagcatttctcatactgacccaccgctatcgcaggcaagccagctcccacattgggtccggcgactggcttgaagcccaaccccttcacaatttcgcgacactccccgctacaaaagccacacgcttttcacctctcaatccgtataatgccgacctttcagggttgtaagaaccgcgacaattacttgtagccttattgcctgagcctccgcacaagcccgctgagccgggctattcacacaggtgccatccatggatttcaacccgctcgaccttatcctgcatctcgacgtctacctcgacatgctggtaaccaattacggtccgtggatctacgccattctgttcctggtgattttttgcgaaaccggcctggtggtcatgcccttcctgccgggcgactccttgctgtttatcgccggtgccgtcgcggccggtggcggtatggacccagtcctgctggccggcctgctgatgctggcggccatcctcggcgacagcaccaactatgtgatcggacgaacggcgggcgagcgcttgttcagcaacccgaactcgaaaatcttccgccgcgactacctgcaaaaaacccacgatttctacgacaagcacggcggcaagaccgtgaccctggcgcgcttcctgccgatcctgcgcaccttcgcgccgttcgtcgcgggcgtggccaagatgccgtacccgcgcttctttggcttcagcgtactgggcaccatcctgtgggtcggcggcctggtgaccttgggttacttcttcggcaacgtgccttttatcaagaagaacctgtcgctgctggtggtgttcatcatcctggtgtccctggtgccgatgattattggcgtagtgcgcagccgctttggccgcacgtcctccgaagccaacccgcactgattgcccgtgtggtccttcagcgcctggcgtcgccggcgcctgctggccaagcacccgattgccgatgacacctggcaacgggtgcgccaccacctgaccttcctcgacggcatcacgccggagcaagaccagtggttgcgcgaagcctgcgtggtgttcctcagtgaaaaacacctcaccgccctgcccggcgtcgaactgcaccaggaacaacgcctgctgctcgccgcccaggcgcaactgccgctgatgaacctgggcgacctcgactggtaccagggcttccatgaaatcgtgctgtaccccgacgacttcctcagcccacaacgccatcgcgatgccagcggcgtcgaacacgagtgggacggcgaacacagcggcgaagcctggcaacagggcccggtgatcctcgcctggcccggcgtgctcgccagcggccaatgggaaggctacaacctggtcatccacgaactggcgcacaagctggacatgctcaacggcgacgccaacggcctgccgcccctgcaccacgacatgcgcgtgcaggactgggccagcgtcatgcaaggcgccttcgatgacctcaaccgccagctggacgccaacccggacgccgagaccgagatagacccttacgccgcggaaaacccggcggagttctttgccgtcaccagcgagtatttcttcagcgccccggatttactggtcaacagctatccagaggtgtacgcccaactcagccgcttttatcgccaggatccgctggcccgcctggcccaactgcaagcctgcgacccgcgctactcgccacagagcgaatgaccgtacgacgcttggcgcatggcatcggcgtcagaatatgcctataatcgccgccacttttaggccaatccggccatgtcatatggccaactaacgggggcaacgcccaatgagctacagcaagattccggctggcaaagacctgccgaacgacatctacgtcgccatcgaaattccggccaaccacgcgccgatcaaatacgaaatcgacaaagacagcgactgcctgttcgttgaccgtttcatggccaccccgatgttctacccggccaactacggttttatccccaacaccctggctgacgacggtgaccccctcgacgtgctggtggtgaccccttacccggtcaccccaggctcggtcatccgcgcgcgcccagttggcatcctgaacatgaccgacgacggcggcggcgatgccaaagtcatcgcagtgccacacgacaagctgtcccagctgtacgtggacgtgaaggaatacaccgacctgccgccactgctgctggaacagatcaagcacttcttcgagaactacaaagacctcgaaaaaggcaaatgggtgaagatcgacggttggggcaacgcagacgctgcccgcgccgagatcatgaagtcggttgccgcctacaaaggctgatacccgcgcctcattgccacggcaaataaaaagccccgttaattcggggcttttttatgggccggattaaacatcaagttcaatgtttatttgcagcgtttaactaacttgcacacctgaaagatcccgccacaactaagccaaatcctacaactgcaaatcaacgcatggtttatttgattagactttccggccagtaaactctgcgtttatgaatacatcaggtgatcgtttaaaagcgctactacgggaagttcatctttccgcctccgacttcgccaagaaccgcggcgtcacgcctcagcacgtgaacaactggttcaaacgcggcgtccccatgggccgactcaacgagatcgcagagttgctgtgcgtctcaagtcgctggttaagcgacggcaaaggccccaaacacccgcccgccaactacctgttggaaggccccaccgcaaggattgcaaccgcccgcgaagacaccggcaaatacctcacaggccccgcctgccgcccggaaaaaaccgacgtggagatccccctccaccccaccttcacctcaaccgaacgcatccgcgtctccctgcacagcctggaaaccctcaacgtcaaccccgaccgcgccataggcgcctacatggtcgacaacagcatgatcgacattatccaacaaggcgccaccctcgccatcgaccgaggccgcacccaaatcatcgatggcgaaatctacgccgtcgaacatgacggcatgctgcgcatcaaatacctctacaaccgccctggcggtggcctgcgcatgcgcagccacaacgccagcgaacacccggacgaatacctcaaccacgaggaacgcttcgagcaaagcttcaaaatcgtcggctgggtattctggtggtccaccctcaacaaccgtcgcccaccggtgcccctggatgaacacctgctgggctgggaaggctctaaatcggaaccggaggtgggcaactgaagtgaatgtgggtatcatgcgccgcacatttggcaggggtcgcttttagctgattccctgccggcgaagcggaggagttcccgcggatgcccctactattcagcccgacgcaatgtgggctgagcgatttgaaggctggtgaggtttgtcaaaaacaagctgaggcagtccccgagaagccggccacaagccggctttttaatgtctgtaagaatgcagttcaattgcccaacagctgctggacaattgaatcgtcaacaaaagcgggcaggtatcctacccacccttcaatacgcgtcatttaggctgcaaacactccacagccctatccgccaccatcttcgccatctccaccaaatgcatcaccgccctctgtggcgcagccactgactcgccgatcacctgcgacgtagccagcgcacaatgcagcagctcagccacctgcacccaggcatcctcgaagctcagttcttcattgaccgtaaatgggttggtcgagtgtgacgacagcgtatctgaacgaacgttatccatagcaaaactcctagcagtaagtgactaccaccgtcctttcgcgactaaacgagcagaggtggcggctgtacgcaggttagtcgaccggccgctaggcaccggcgcacccaggggtgccctgcgcacagccaccataaagtgcaggcgagaagacacctgtctttgggatggcgcgtgcgcctagcgaggtccgggcgactaaacccgatcactgaattagcagtgacggtcagcagcctagtcaccccattccgctggcgcaagcggttgggattctctaggaaacgtcctgcaaatgaaagggatcggacctgctggcacaacgaattcgagaacgttgaagagctactgattaatataattttcagcagtcctccgtaaaagcaccgtcattgcgaaccaaactgatatcacaatagaatcatcgatctcatcctgccaacggatgagcgagcaggatggaacaacttcagctcatacgtaggtcaaggagaccgatatgccggatatcaaggaacaaaaacttctctatcacctcacttcactagaaaacctgagcggtatttttcagcacgggctacaaccgcgagctcagctcagggcgttcgaagacgtggctgatgtcgacattctgaaaaaacgacaaggtctcgcactagagcagtacgtacctttccactggttcgccgcaaatccattcgatggaagcgttcaacgcagaaggcctgacacccaatttgttgtgattacggtgcatcgaaacgtggcaattagaaagcaatggaaggtcattccccgccatccattggctaacgatgccattcagttgctcgattatgccgatggcttcgaggccatcaattgggaggttatgaatgccagggactaccatgaccctcagtgcaagagcatctgtatggctgagtgcctttcgcccgatgtagtttcccctaacgatttcttcaaggtttttgtttctaatgccgaagtagaagccctctgtgagtctaaaatgcgcgaggccggtgttaatgtacaaatcggagtgaatcggggaatgtttcttagatgatttataacaacctgaatcctgaaaaagctctgatctggcgcatcattcatcgcgacaatctgccttggattctggacaacggcctgcactgcgccagctcagaggtgcaggctgtgcaatatgtgaacataggtaatgttgatttaatcgacaaacgccgcacgcgctgtgtgcccattgctcctgcaggctttctgtcagactacgttcccttctatttcacacccttctctgtgatgatgaaaaatattcactcaggttggagcgttcagcaacgcaacaatgatgagatcgtgattctggtctccagcctccaccgcgtcgccgagcttgacctaccgttcgtcttcacaaatgcacatgcgtacccggattggacagactattacagcgacctgacgaatctccacgagatagattggtctatccttcaacggcgtgacttcaaacgtgaccccgacgaccctcgcaaaatggagcgttatcaggctgaagcgctgattcaccaccacttaccgattacaggactccttggcatcatgtgttacaccgatgcgatgaaagaacgcatagagcaggacgtcgccgctagaggccttacgttgcctgtgcatgcgcgtccgggatggtatttccaatgatcaggtttacccagggcaaccttctggaagccaacaccgaagtcctcgtcaacacggtgaataccgtgggcgtgatgggcaagggcatcgcgctgatgttcaaagagcgttttgcagaaaactatcgcttgtacgctgcagcctgtaaggctggcgaagtagagaccggaaaagttcacgtaacggcggtcaacgaactggacggtcctagctggatcgttaactttccgaccaaacgtcactggcgatcgccctcacagatggcatggataaccgaaggtctgcacgacctccgtcgttttctgattgaaaaccatgtgaaatcagtcgcggttcctccattaggggccggtaacggtggtctgaaatggccggacgttcgcgaacagatcgtggatgtcttgagcgatctggatgtcgatgtgttggtttttgagccatccaatcagtatctgaatgttgccaaacgcagcggtgtagaaaaacttacacccgctcgcgcgctcattgcggaactggttcgacgctactgggtgttaggtatggaatgcagcctgcttgagattcagaaactagcttggttcctggagcgcgcaattgagaagcggccaggcctcaaaaacccactggatcttaagttcgttgctcataagtacggaccgtatgccaatcggctagagcatctgcttaacaacctggacggtagttatctacattgtgacaagcgcatcagcgatgcggaaaacagtgacgtgatctggtttgaccaagatcgcaaagcctttctacaaacctatctcaagacagaggccaaggagtattcccaggccctggagcacaccgccgagttgatcgatggctttgagtctcccttcggcatggagttattagcaacagtcgactggctgctgacccaggaagatgtagccccgactattccggctgtgcgtgaggccctgaaacgatgggatggcggtgtcgcggctgccgctcgcaaaaacaagttgtttgacgatcaagcacttgatattgcgcttaaacggctcacgtccagcagcttcagaccccaggtggctgcctgttgtatttgaagatcttgcgtgcaggctttaaatagcctgcacgcaagatttgatacttaactggaacccgacaaagtcacttacccaggcttaagctctttctgcctggtggtttcccgcctcacatcccccgcctccagaaactgagcccacctaatggctcctcatgacaattgtccactttaagttgacagtaagactcctcccacccgatttatccctcatcacccacccattaatctgtgcccatgttgaacgcaacgcccaaccaacctaaacaaaaaaaggattcaaccatgagcgctccaacctacaaccgcttgaacaaagacgacgccattgttctgctggtcgaccaccagaccggcctgatctccctggtgcaggacttctcccccaacgagttcaagaacaacgtgctggccctggccgacctggccaagttcttcaacttgccgaccatcctcaccaccagtttcgagcaaggccctaacggcccgctggttccagaactgaaggaaatgttcccggacgcgccgtatatcgctcgccctggtcagatcaacgcctgggacaacgaggatttcgtcaaggcgatcaaggccacggggcgtaagcagatcatcattgccggtgtggtgacggatgtgtgtgtggcgttcccgacgttgtcggcgctggcggaaggcttcgaggtgtttgtggtgacggatgcgtcgggcacgttcaacaccacggtgcagcaggcggcatggagccggatgacgcaggccggtgcgcagttgatgaactggttctcggtggcgtgtgagttgcaccgcgactggcgcaacgatatcgaagggttggggaatctgttgtcccagcggattcctaactatcgcaatttgatgaatgggtacgcggcgctgacagctcatcagaagtaaaccagccgagcatcacaaaagcctgcctttaagcgcaggctttttcatgggcgaatggttctgttcagcctgaatcaggaccccgtcagacgtccctaatccaggatcaagtgcggcagaaaccggcttgagtcctttgtgatcaagctattgtcctcgcgcacgccgatgccggcggcctggtcgccaatgacccaggagccgatcagcgtgtagctgtcaccaaattttggcagcggtgcaaactcttgaaggatgaagggcgcatccgtgtaggggccgtcttcttttacgatgaggccttcggcggtttgcagttcgatgttggcgccctcccgtgagaagaagggtttgcgcacccagccctttggcacagctttgcctggatcggtgtccaggtgggacgcgagcaggttggggtggcctgtgttgaattcccacagcagcggcaggatgcctttgttggaaataatggatttccacgcgggctcgaagaactgtgtgtcgctctgggcaatcgcggcaccaaagggttcgtggaagatgaactcccaggcgtgcagtttgaacaggtgggggatccagcgatcttcaaggtcgacgaagcggccttcgctggtcaagccgatgtcttcgatgtcgatgtggcgcgattcgatgccgaccttttcggcgaccaggcgcaggtagtcggtggtgcctttgtcttcgaccgagtctttcatcgaggcgaagtagaacggctggttgacctgcagctgcgcgaaggcctggtgcagtttggtgtcgatgctgttgaactggtcggcgtgcttgggcagcaggccgcgttcgatgcattgttccagccagccccactgaaatgccgcggcttcgtagaggctggtgggggtgtcgtagttgagttccagcaacttggcgggcccgctgccgttgtaggagaagtccatgcgcccgtacaggtgcgggtggccttcgagccatgaggtgcggatcatgtcgtagaagggcgcggggatgctcaggcgttcaagcagctcttcgctgtggaccacgcgggcgacgaggtccatgcacatgtcatggagctcggtggtcgggtcttcgaggtcgcgctcgatttgcttgagcgtgaactggtagtacgcgctttcgtcccagtagggttcgtcgtcgatggtatggaacaggaagccgagactctcggcggtatgtttccagtcatgacgctctgcgcattggatcttcttcatggccggtttccttagctgctcgacccgccgccccagccactgcgtgcgctggctttgctgccgaagccgcctcgggaggtggccgatgaaaccgagctcgacgtaggtgaagagcgcagcgtgctggtgtaattgctgctgccgtaccgggcctggttcgagcggccaaaggtcgcgccattggacacgcgttggttgagcgtcgagttgccgtagttgccgcgatcatcgcgatagcggtacaccggttccgagcggtagctgttgcggttgttgctcagcatgttgccgatcagcaggccggtcagcaggctgctggtggagaagcctgagccaccgccgctggcctgagcgttggccgcttgcgcattggcagcgtcgacctgggattgggtcacctggccttcggcggtcagttcgaagccgcccaagcgtgggatgaatttgccggtggagtcttgctggcaccagtcggcgacaaagtcggcgtcgcaatcggcctggctgtcgtacaccggcgctatgcggcgatgctcggccatggcggtcatgtaggcgtccgagcagacgtccaccggaagtttttcatcggcgcattgctgtaccgattggaagttgtacttcttttgcaggtcgtaggttttttccgttgggccgcagccggatatcgccatggcgaccgacgctgccagcgacagctggacgtacttgcttcgtttcatcgggagctccgtgggcaatcagttcgaggtgggcgtcatgcacgcggcattcagcatgccgacgctgatggccaccgcggccacgtagataccggccgccagttcgcccttcttgatgcgctcggatgtgcccttgagcaccaggctggtcagcaggaacgccaggagctggacgacggcggcgatcacggcccagacgatgaagtcgagaacgttgatcgagtaagcaatcacgttgctggccggaatggcgaaaccgacgatggcaccgcccagggcgaccgctgcggaggtgttgcccgcacggatcagttcgaactccttgtgcggggtgatgcgggtgtagatgaactggaacagcgcgaacagtaccgcagcccccaggatgtagaggacaaagccgagcacggcggctttgttgagggagatggagagtgcttctagcatggacggcttccttttttagagcgtagtcaggtcggtggtgtacagcgaaatgcctagggatgtgctcaggctgatggtgccttcggcatcttcttcgacggagaacagcagaaactctcgacggtcggtcaggccggtttcgcgggcgtatagcatcgaacggtgctcgacgctgtaggtggcttctgggctggtgacctgttcgctcatcgccaccaattcggtctggccgtcctcgctgccccactcccggaagaactcgacgccgtcgtgggtgtaggtcggcagcccgatcaggctctgtgggcccgccagcctgcgcagttccgcttcgctgctgatggtgacgtaactgaggtagttgaacacaatcaccgactcgacctggcctgcgacctggccggtggtgtgcacctgcagccaataatcttcgtcgttcatgtaatagcgcgacagccaggtggactggccgaggtcgatggtgccgttgctccagatttcctgggagccggggatcaccacgttggttttttcatcgagcagcaatttaagggtggtgtcgaacatcacccccttgcccggtgccaggcccagcgggccggtggctggcaggcttgggctgacggcccggttcgagtcggtagtggcttttggggcctcaagccccatcaactgtttaagccatcccatgggagatttccttaagtcgggtggaagcgatgtagaagagttcgccgcctttgacctgtgtggcattgggcgggttgatcgacgcctgctgaacaccttgggcgcgatagccgatgagggtggcgttgtggcgctccttcatctgcgtgtacagctcgccgaaggttgcctcaaaggcatcgggcaatttcatcaggtattgggtggcgccctgccccacgcacagcagctcattgatgaccaccgacgagcccgggtcctgagaggcgcgcaccagcatttcgatcgccatgctggacgtgcactccaggcgcggagcgtaggagctggcgagcgcggcgatttcactttcgttgaagtgggcgaccacatgccccacggggctcagttggttcaccgccagcacggtggccagcgtcaggtcgtcagacggggttcgcaccagcacacgctcggcaccgggcacaccggcacgcagcaacagcgcggtggaagacaggctttcgccgcggatgaacgctgctttgcccggcatcgggttttcttcaaggctgcaatcgcagatcacgatcaggttgtcgttcgaggtttcgtcttgcagcaacaactcaatcacccgctcgctggacgcgccctcccagccgatcagcacggtatggccgaccttgccggtgaaatcacctttgcccttcatgccttttctccatgcatcgataacactgctggtggttttgccgatggctgccgtgagcagcgcaatgccgccgagcatgacccaggccgccacgaaaattcgccccgccgaggtctgcggtgcgaggtcgccatagccgacggtgagtgtggtggtgagatagaagtagataaacgtggcgagagcggtgaggtgttgttcgcccagcaacaccaggcccaggtaagccgtgctgaggtggacacccaaggcaacgatcagccctgcccaaccgaagcggtgaaagagggaagaggcgtacatgcgtaacaaaagaaaaatcgacatttagcccctggctccctgggtacttgaatcctgacgacagcatcgcctcggcgtttggatgctcaagtgcgttcacccggcattaaacccgctgcgcggcgtggatagaagtaccttggctgcaataaatccagcgagtgcaccaaagaggtgaccttcgaaggaaatgccctgccgggggaggaagcccacgatcagcccgccatacagcaacgccacgacagcggcggttagcaggttgctccagcttctatggaaccaggcgcgagacagtagataagcccatagcccgaacacccagccgctggcgccgacgtgaacgcctgcaaaaccgaacagccagaccaacgcgccacccagcacaatcacgattgcgctgacagcaatgaagcggtggagcccgtcgaggataaccaaggtgcccaggaccagaaaggcaatcaggtttgcgctcaggtgggcaaaggacgcgtgcagaaacggtgaggtgaggatgccgaacaggccgtgcagtgttcttgggaccagcccgaatgccatcaggctgtaaccggtcgctacattgagcagttgcagcgcgaccatgaagagggccaggccagcgattgtcttgaaacccttcaaggcgttcatcctcacctcggcataaaaaagaagggcagaaatgccctcctcccttcggcaacgttgcttactcagccgacttttgcttcaagcgctccagaatcgcattggcactgccttcgttcggcgtgatgccggcatcgcgcagtttgcgttccaggtctgtccccgtcgacgcttcggccagttcatcctgagcttgcagttcagcggcacgttgctgctgtttagcctgcaagcgattgagcgtaccgacggcggtttccagcttgccgttggcaccgccgctggcaatggatgcgctgacctgggccttctgcacgctgtcgcgagccttggccatgtccacttgctggcgcaggcttttgatccggctctcggccttggtgatgtccttgcgcatgctctcggcgtagccaccgaactcggcagtttgtttttgctcgacgtcccgctcgttggtcagggtcgaaatggcttcggcgacttccagggccagatcttcacgattggcctggattgcggccatcgccttggattccaggtctttgatcttggcgtcgtactcgccaacacgatcagccgccagtttgtgcttggccatgatgctcaccagctcacgcttggcgttggccaaggcgctgtctgcatcgcgaatttcctggtcaaggatgcgcagggcctgttggtccacgatcgattcgccgacttcgctggcaccgccacgcagcgcggtgaacaatttgctccagatggactgagtcattggattttcccgaataattaaatgaagaaacgttcgaaggcttcgctggcgcgctgcacgttatcaaccagggttttcacctcggtcacgatgttggtcaggctggagtcggagctgagcgcaccgaacatgttgtaaaccacctgcccgttcggcatggactcgataccgatcgacgacaacgggaacatctcccggctgcgcagcacggcgtcattgaaggccggtacgtcgttgatggactcggcgtcgaccaggacggtatccacgatgatttgctcgcccaccaccgcgatgtaaatcggcaagccaccaaagtcgttcatctccagcttgatgctggactcggagccttggacgagagaaagcgtaatgtcattggacgtcacgtcatccagggcctgaagagcactgaagaggcgatcgatattccagttggtacctgcgctcatgaaattctccgacatgaatgagccagccaggatcggttggcgtagctgtttctccatttgcttgagcaggcttctgttttcgggaagcacccaagtctcgtgtttcacataaccggccgccgccagccccgcgcgcatctgcttcatgtaaaagctcgacggcttttttgcggacggcttcaagcgctctcccttgaggcttgctgaatgggtatcgggccctgctgatgggctcgatggagagctgctgttcatggtactgacctcgctgtgaaaaactcacgcgtgagaaaatctacaggcaatccgcagggtactcaatagctcacgcgtgagatttttccttacatttttcagccaccgaaaaggcccagcctaccccgccaactctcgctcgatttgctcgatgctaggcaaactcgtgtgccgggaagtttgtccaaaagcgcgacttgatggcaccaacacaattgtgcagcaacctgttgcacaaatttccgaatccgaccacgccttagcaaaagcacgcctgtacttgaaatcgcgcggcgaaaaaccctgatgccagggaaggcaggctagccagcccacagtgccgtcacaagcattcgagagcagttcaggaaggttcctgcttacctcacagaaaggtcctgctggcccttgactctcccctatacggcaccccctaccctgagcccccttttcaggacctatcaccatgagtcagcgcattctggtcattctcggccacccgtccgccgatagtttttgttccgctctcgcgcacacttatatccacgccgctaaaacggccggtcacgaagtccgcgtcctgcgcctgggtgatgtcaggttcgaccccatccttaatcatggctatacccaggcccagacgctggagcccgacttgctcagcgcccagtccgacatcctttgggccgagcacctggcgtgggttttcccggtttggtggggcggtatcccggcactgatgaagggctttatcgaccgcgttttcctccccggctttgccttcaagtaccgcgcaggcaaggcattcccagacaagctgctaaagggccgaacagcgcacttgttagtgaccctcgacacgccgccgtggtattaccgctgggtttatcgcatgccggccatccaccaaatgcggcgcaccacgctggcgctgtgcggcatcgcgacgagcaagacgctgctgttggggccggtgctgggctcttcgctgacgcagcgggccaagtggctgaaacaggccggcgcactatttgaaaaagggagttttcatgtacatcggcaaagccgcgcagttgtccggcacgaccatcaaggcgattcgtcactatgaggcaatcgggctgatgccagcgcctgcgcgtcggggcggttatcgcgtttataccgagcagagtgtcgagcggctgatgtttataaagtgcgcgcaacagctggggttcaagctcaaggaattacaggagattttgcaggggtacgagggtgatgcgcttccttgggacaaggctgaccaagccatcgccaataagaagcaagcgttagccatgcaaattgtggcattgcagaatatgcatcagggtttattggtcttcgaggcccaattgaaagcggcgcagggggagtgctgggtcgccacgaaggcaggctgagactcggtgagccgaataaggtcgctaatcggctcatggggtgagccgaataaacccatcaatcggctcacatcaccgtgtgtgcgccactcatttgccccaatcccccatgtctgctagtgtcgcgccggtttaccgtctaccggaattgccgccatggcccgcaaaaaagttgcactcgatttcgaacaatccctcgccgacctgcaagccctggtcgagcgtctggagaacggcgagttgtcgctggaagactcgttgacagcgtttgagcaaggcatcggcctgacccgcgactgtcagagcgcgttggcgcaggcggagcagaaggtccaggtgttgctggagcgtgacggggagttggccgaagagcctttcgatgcggaacagccggaatgatcagcgcataccaagccagtagccaagcccgggtgaatgccgcgctggagcccctgtttgttgcgccaagcccggaaatgacgcgcctctatgaagccatgcgctacagcgtgatgaatggcggcaagcgtgtgcgcccgttgctggcctatgccgcctgcgaagctctcggggcgccggcagccgaggcgaatggtgcggcctgtgcggtcgagttgatccacgcctattccctggtgcatgacgacttgccggcaatggacgacgatgacttgcgtcgcggccagcccaccacccacaaagccttcgatgaggcctatgcaattctggccggagatggcttgcagagcctggcgttcagcgcattgctggacccgacgctaagcagcgtcaacgccgagatccgcttgcgcatggtcaccgccctggcccatgcagcgggcccggctggaatggtcggcgggcaggccatcgacatgggctcggtcagcctcaagctcgatcaaaaagccctcgaacacatgcatcgccacaagaccggtgcgctgattgaggccgccgtgcaactgggcgccctggccagtggccgtgccgacgccgagcaattagcggcgctgcagacctattctcgtgctgtcggcctggccttccaggtacaggacgatatcctcgacgtggaaagcgacaccgccaccctcggtaaacgccagggcgccgatatcgcacgggacaagccgacttatcctgcgttgctcgggctgcaagccgccaaggcgtatgccatcgagctgcgcgaccaggcgctggaagccctgcgacctttcgacgcggcggccgagccactgcgtgacctggcgcggtatatcgtcgaacgtcgccactgacagccgcggccatttgcgccgcatatcggccaagttcggcgctctgcgtgggcagtttgcacggcttgaggtaaactgccgcctcttctatacctataacgattcgcctgatgcccacgacgtttcaagagattccccgcaaacgcccgtccacgcccctgctcgaccgtgctgccacgccggacggcctgcgtcgactgggtgaagccgagctggaaaccctggccgatgagctgcgcctggaattgctctacacggtcggccagaccggtgggcattttggcgccgggctgggcgtgatcgagctgaccatcgccttgcattacgtgttcgacaccccggacgaccggctggtgtgggacgtgggccaccaggcgtatccgcataaaatcctcaccggccgtcgcgagcgcatggccagcctgcgccagaaggacggcctggccgccttcccacgccgtgccgagagcgagtacgacacctttggcgtcggccactccagcacgtccatcagtgcagcactgggcatggcgattgccgcccgcctgcaaggcagtgagcgcaaggcgattgcggtgattggtgatggcgcgctgaccgccggcatggccttcgaagcgctgaaccatgcgccggaagtggacgccaacatgttggtgatcctcaacgacaacgacatgtcgatttcgcgcaacgtgggtggcctgtccaattacctggcgaagatcctctccagccgtacctatgccagcatgcgcgaaggcagtaagaaagtgctgtcgcgtctgcctggcgcgtgggaaatcgcgcgccgcaccgaagaatatgccaagggcatgctggtccccggcacgctgttcgaagagctgggctggaactacatcggccctatcgacggccacgacctgcctaccctgatcgccacgttgcgcaacatgcgcgacctcaagggcccgcagttcctgcatatcgtcaccaagaaaggcaaaggtttcgctccggcggaagtcgacccgattggttaccacgcgatcaccaaactcgaacccctcgatgcccctgccgccgcgccgaaaaaggccagcgggccgaagtattccggggtgtttggcgaatggctgtgcgacatggccgccgccgacccgcgcctggtgggtgtgaccccggcgatgaaggaaggctccgacctggtggcgttcagcgagcgtttcccgctgcgttacttcgatgtggcgattgccgagcaacacgccgtgaccttcgcggccggcatggcctgcgaaggcgccaagccggtggtggcgatctactccaccttcctgcaacgcggttatgaccagctggttcacgatgtagcggtacagaacctcgacgtgctgttcgccatcgaccgtgccggcctggtgggcgaagacggcccgacacatgcgggcagcttcgacctgtcgtacctgcgttgcatccccggcatgctggtaatgacgccgagcgacgagaacgaactgcgcaagatgctcagcaccggccacctgtacaacggcccggccgctgtgcggtacccgcgcggcaccggcccgaacgccgtgatcgaaaaagacctggagccgattgaaatcggtaaaggcatcgtgcgtcgccaaggcagcaaaaccgcgttcctggtgtttggcgtacaactggccgaagccttgaaagtcgctgagaagatcgacgccaccgtggtcgacatgcgattcgtcaagccactggatgaagcgttggtgcgcgagatcgccgctggccatgagctgctggtgaccgtcgaagagaacgccatcatgggcggcgccggtgcggcggtcagcgagttcctggcgcgggagaatatcctcaagtcggtgctgcacctgggcttgccggatgtatacgtcgaacacgccaagccggcgcagatgctggctgagtgcgggctggatgaagcgggtatcgaggcgtccgttcgcgagcgcctggcgctactgaatctgtaatcagccccaaatgtgggagcgggcttgcctgcgatgacggcggcacattcgctaacaatgtgtcagatacaccgttatcgcaggcaagccagctcccacagtggttttgcatgacattcgaatgctatggacagcccatgaaacgcctgtgccttgccctgctactgcttccctgcgccgacctgctcgccgatacccgcgacgaggccctgaagctctccgacgtggttatcagcgccaaccgccaagtccaggcgcgtaacgacagcagcgccgccaacaccgtcttcacccgcgccgacatcgaccgcctgcaacccaccagcgtcaccgacctgctcagccgcgtgccgggcgtgcaagttgcgccaaccggtgggcgtggcagtttgccggggatttttattcgtggcaccaagtcggcgcagagcctggtgctggtggacggccaacgcatcgccaacaccacctccggcgacagcggcttgcaatacctcaacgtcgatcagattgaacgggtggaagtgctgcgcggttcgcgttcggtgatctacggcagtgatgcgattggcggggtgattcaggtgtttacccggcgcaatgccgagcaaggcttgcagccgcgcttgaaactgagctttggcagcaaccagacctgggagcgcagcctgggcctgtcgggcggcgatgaacacacacgtttcaacctgggcgcgagcctggatgaaactgccggtatcaacgcgagccacgcgtcgtttcccagcgacggcgaccatgatgcctaccgcaatcagtccatcagcctgaacctcagccattcgttcagcgatgagctggaggtgggtttcaacctgttggataaccgtggcaagtcggagtacgacaacagctatggccgctacgacggcgccaccgggcagagcgtcggccagaaaccctacaccgactacaccgtgagcagcgctagcggctatgtcgatgccaagctcaatgacagctggcagtcgcgcctggagctgggccacagtgaaaaccgcgacaccaagcgcgataccctcagcgatgattacagtgcattcaacacctaccgcgactcggtcaattggcagaacgacctgaccctggatgagcaaaacagcctgatcgtcggcggcgattggtacgaagaccgtttccacggttctaccacctttaccgagaacagccgctggaaccgggcggcctttgtgcagcaccgtttcaagagccagtggttttccaccgagctgggcctgcgccgcgaccagaaccagcagttcggcggccagaacagttggagcggcaccctgactgtgccggtcaaccctgacaatgacctgctcttgagctacagcgaaggcttccgcgcgccgaccttcaacgacctctattaccccgacacgcagtacagcaacccaaacctgcagcccgagacatcaaagagctacgagctgcaatggcgcagccagctgaccgacagcgcacgcctggaagcctcgctgtatcgcaccgacctgagcgacgcgatcatccttgacgccggcaagccgcaaaacgtggcgtcggcgcggatcaatggttttgaagcggcgctcaagcaggaactgtttggctggcagggcaacctgggcctgtcgcttatcgacccgcgtgaccgtgacagcggccacaccctggcacgtcgcgcacggcgaacggtgaacctggatctggaccggcaatttgatcaactcggtctcggcgccagctggcaagcgatcagcagcagctacgacgatgaagccaaccgcaaccgtctgggcggttatgccttgttggggctgcgcagtagttgggcgttgaaccgggaggtgtcgttgtcgttgaaggtggataacgtgctggacaagtcttacgcacgggcgaagtacagctacctcggggaaagccagagttatcgtgaagaaggtcgggtgtggatggttggggtgacgtggacacctgagatctaagtgacctgaacgggcgtcatcgcaggcaagccagctcccacaattgaaatgcattcccctgtgggagctggcttgcctgcgatagcgttgtcacaggttcggcgcaatcacctggcacaaccgccccaccgcctccaacatctgcccgctgggccgctcaaggcccttgtccggcactaaccgcacccgagcagccatcgccggccatgccgtccaggcctccctctgagcctgatcccccaccaggatcacctcggggtctcgcgccagcaccgattcgatattcacctgcggcgccggcaacttcaggtcatcaaacacattgcgcgccccgcacacgctgagggcatcgctgatgatctgcccgccgcccacggtgtacagcggttggttccacacttggtagaacacccgcagcggctcggcccgccggtagcgctggcgcaactcggccaagcgctggcgcaatggggccgcacgctcgcgccccgcctcagctcggcccaattgctcggcaatggcctgcacctgggtggtcagttgttcaaggctgtggggttcggcgacgtacaccgggatgttcaaccgctggagctgctcgcgctgggccgggccgacgctgccaggccacagcaggatcaggtcgggcttgaggctgagcaggcgctccatgtccaactggccgtagcgcccgaccgagggcaccttcgccaacgccaccgggcgctcaccaccatcaagtacgccaaccagcaagtcctcggcacccagttcaagcacgatttcagacagtgacggcgccaggctgacaacccgctcgaccgccaacgcctgagcactgaataccagcagcagcgccagccagtagcgcttcatcccaactggcgcggtatgcgatagaggtagaacagcaccagcgtcgacagcgccaacagaaacaacggcaccgcctccaggccgacgaacaccgccagcgcgccaatccaggccggtaacgctgcaaccagcaaggccgtgcgccgacgcgccgccagggtgatccaggccgctggttcgtcagcagtatcaaggactttggaggtggcgatcagcgcgtgtttataagcatgaaaataacgcaggctgagaaacatcgaggccacgccggcgatgaagaacggcatggccaatacgggcaacaaggatccagcacggccaaacagcaggttgatcacaaacaaaggcagcaacgccaacgccaggtactgccaccagttgaaggacagtcgccgtttcacctggccacgggtcacgcgcggtcgacctcgccctggtgctcgttgcccatcatgtggtcgagcttgctggctttggtggccaggtagagtttgttgtgcgggttatgcccggtatgcagtggtacgcgctcggccacggtgatgcccatctcggtcaaggctttgaccttgcgggggttgttggtcatcaggcgcagggatttgacccccaggtgctcgagcatcggcaggcagatggcgtagtcgcgttggtcggcggcgaagcccaggcgctcgttggcctccacagtatcggcgccgccgtcttgcagttcgtaggcacggatcttgttcaacaggccaatgccgcggccttcctggcgcaagtacagcaacacgccacggccttcacgggcgatggcttgcagtgcggcctccagttgcgagccgcagtcacagcgctggctgaacagcgcatcgccggtcagacactcggaatgcacacgccccagcaccggctcaccatcggtgatgtcgccgaggctgagcacaacgtgctcgcgcccggtggcttcttcaagaaagccgttcatggtgaacgtggcaaaaggggtaggcagcttggaagcggcgacgaaaacgacgggcaccgtgtgctcctgatttcagatttcacagaggcgggcattgtaacagcacgttcctacagacgcttaagctgaattatcgctgataaagatcaataggttcgattggcctttggattgattctatgtaggcgcgagcttgctcgcgaatgtggtcaacgatgacgcgggcatcctgggtgaacgcggcgtttatgagtttttcgcgagcaagctcgctcctacaaggggtagggctgtttccagcgctcgaaaattgctttcagctcaccggtcttgaccaggctggccagacgctggtcatacacggccatcaatgccctgccgcgctcggtgtcagcgaaggctacgtagagcggtagttcagcgatatgggtgagtttgaatagcgccgggtcttgcgcttggctgagcacgtatttggcttcggtaagggcatcgatatagaaatcggcgcgaccgtgttgcaacatcggcagaatgccactgcgtcgctcgatctggttgaaccgctgcacgttgggcaggtacccctcgtacttgtaaccacgcacccaggccaggcggtacttgcccagggtcgccaacgtcggcgtgggtgcagtggccagcccgagagcgtagacatgatcggcgtcgaagttccagcgcgggtacagcacaccactggcctcctcgcgataggtgccgacacaaccatccacctcaccacgctgggccaagccgatcgagcgggtgtagggcacgctgcgggtgtgcacggtgatgccagccggttcaaagacttggcgcaacacgtcccaggccaggccgctgccatctttgttggtgtagtcgttccactcctcactggccagcacgattttgccgggcatgggagtgtccgcctgggccagggaagcgaaggtacacagcacgatcagcagccagcggcatacagccatagtcacggcctctttctcgggataatcgtataaaaggtagcgcagaccgccggcttagggcgtctggcgaaaatgctggtagccgcgcacggccggggtgatgtcctggccgttgccgtcgagcagcgtcacgccctgccccgcttcgacccggccgaccacgtgcaccggccagccatccgcctgcaacggcgtcaactcggacggtggcaaggtaaacgccagcacgtagtcgtcgcctccgctcaacgccgccacgtgagcctggtcttcaccgacaaacgccagcaaggccgcagacaacggcagccggtggcgctcaaccaccaggcgcaccgctgacgccttggcgatatgcccgcaatcggccagcagcccatcggagatatccatcgccgctgtcgccttgccccgcagcgcaagccccagggctaactgcggttgcggcgaccagtaatgcgccagcagcggctcggcgatggctgcgtcagccgtgcgttgccccaataccaacggcaaggcacccgcggcattgcctaactcgccacccacacacagcaggtcgcccggctgtgcaccgctgcgcgtcaaggcctggccagccggcacgcggccgaacacggtcagggtcaggctcagcggcccacgggtggtatcgccgcccaccaggcccacgccgcagctttgcgccatggcattcaaaccttgggcatagcgttgcagccaatcggcttcgacgctcggtgtggtcagggcaagggtaaaggcgagggggtgggcgcccatggcggccaggtcgctcaccgccacggccagcgagcgctggccgagcaggaacgggtcacaggggtcggcaaaatgcacccctgctaccagcgtatcggtagagactgccagttgctccccggcgggaagcgccagcaaggcgcagtcgtcgccgatccccagggcaatgccttcgccaccttgcgcacagggcgcggcggcgaagtatgtgcggatcagctcaaactcacccattgaggaatcaagcgcagattagcgcttgtgttccttcacttcggcttcacgcaggcgcggagccagcttgtcgagcacgccgttgacgaacttgtggccgtcggtcgaaccgtagactttcgccagttcgatgccctcgttgatcacgacgcggtacggcacgtcaacgcgcttgagcagctcccaggtggacagacgcatcacgcacagctcaaccgggtcgagttcttcgatggtcaggtccaggcatggcgccagggctgtgtcgatctcggtcaggttggcatgcacgccgtgcaggatgtcgtggaaatacggcagatcggcgaaggtgaaatcgttgtcaacgcgaaactgcgcttcgatctcgttcagcgaagcacctgccaggtgacgctggtacagcgcctgggtggccagttgacgagcagcgcgacgcttttcgttcttggaaggcttgccggcgtccgcagggcgaggctcgcgcgggttgaaacgatcgctttcgtcggaaatcacttggcctccaactgcgacagcaggctgaccatttccagggcggacaaggcagcttcggcgcctttgttaccggccttggtgccggaacgctcgatggcttgctcgatggaatcgacggtcagtacgccgaaagcgactggcacgccgaactccatggacacctgggccaggcccttggtgcattcgccggccacgtattcgaagtgcggggtaccgccacggatcactgcgcccagggcgatgatcgccgcgtattcaccctgctgagcaactttttgcgcaaccagtggaatttcgaaggcgccaggcgcacggataagggtgatatcgctctcgctcacaccgtggcgaaccagggcgtcaacggcaccgcttaccaggctttcaaccacgaagctgttgaagcggccaaccaccagggcatagcggcctttgggggcgatgaaggtaccttcgatggtcttcagggtcattcgacaaatctcttaaagagccgggacgcgaaaagtgcgtcccttagtgatgatttaatcgcgaacaagggggcaaaaatcgccggcctttattcggagggcacgtattctacaacttccaggtcgaatccggatatcgcattaaacttcatcggtgcgctcatcaggcgcattttgcgcacgcccaggtcgcgcaggatctgcgaaccggcaccgacgatgctgtaggtggtcggttttttcaccggcacggcgtcggcggtttcgcggatgtgcgccagcaacacgtcaccatcgagcgggtgaccgagcaacagcaccacaccgctacccgcctcggaaaccgcagccatagcggcgcgcaggctccagcggcccggctgtttgaccatcaacaggtcacgcagtgggtccatgttgtgtacgcgtaccagggtcggttcttctgcgcaaatgttgcccagggtcagggccatgtgcacgtcgccttccactgaatcacggtaggtcaccaaattgaattggcccagttcgctgtccagtggctgctcggcaatccgctgaacggtacgttcgtggatcatgcggtagtgaatcaggtcggcgatggtaccgatcttgaggttgtgttcggcggcaaaggcttcgagttcagtacgacgggccatggtgccatcatcgttcatcacttcgcagatcaccccgcttggctcgaaaccggccatgcgcgccaaatcgcaggcggcttcggtgtggccggcgcgggccagggtaccgcccggctgggccatcagcgggaagatgtggccggggctgacgatgtcttcagccttggcgtctttcgccgccgcagcttgcacggtgcgggcgcggtcagcggcggaaataccggtggtgacgccggtggtggcttcaatcgatacggtgaacttggtgccgaaacccgagccattgcgcggcgccatcaagggcagcttgagcaattcgcagcgttcgcggctcatgggcatgcagatcagcccacgggcgtgcttggccatgaagttgatgtgctcgggcttgcacgcctcggcggccatgatgatatcgccttcgttctcgcgatcttcgtcatccatgaggatgaccatcttgccttggcggatgtcttcaaccagttcttcgatgctattgagcgccacgcggcacccccttggtcaggatttcaggtagccgttagcggccagaaaactttcggtgatgttaccggttgcaggctctgcggccttttcgcccagcaacaggcgctccaggtaacgggcaagcaagtccacttccaggttcacccggcggcccggctggtacgaggccatgatggtttcgctgagggtgtggggaatgatggtcagttcgaattcggcgccattcacggcgttcacggtcaggctcgtgccgtcgacggtgatcgagcctttgtgggcgatgtacttggccagctctttgggcgcgcggatacggaattccaccgcgcgggcgttttcgctgcgggcaaccacttcgccgacaccgtcgacgtggccgctgaccaggtgaccgcccaggcgggtggtcggcgtgagagctttttccaggttgaccgggctgccggccgcaagatcgttcattgcggtgcagtccagggtttcccggctgacatcggcggcaaagccgttgcctggcagctcgatgacggtcaggcacacgccgctgacggcaatgctgtcgcccagcttgacgtcgccgaggtccagcttgccggtttcaaccagcaggcggacatccccgcctttgggggtcattgcacggatgctgccgatggattcgataatgccggtgaacatttcgttctcctgaaaacgagggggctgccgcttaagcgcaggccgggaattatacgctcgctgctgggacggggatggcagtgactcgccagtcgtcgcctacagcgcgcatgtcggtgatcttgagttggggcgcgtcggcgagtttctcaagcggccagtccagcaacggccgggcagcggagccgaggaacttgccggcgatgaatatcacgtactcatccaccaggccttgttgggcaaacgcaccggccaggcttgggccagcttccaccaacacatcgttgacgccacgggcagccagggcgaccagtgccgagcgcaggtcaacctggccgtccacccccggtaccaccaggcactcggggccgcgggggaactggttctccggggtgacgcaggtgatgaccaatgccgggccggccttgaagaacggtgcgttgagcggcacccgcaggcggccatcgatcaacacgcgcagcggcgggcgcgacatggccagggcggtggttgcttcgtccaggcccagttcggcggcgcgtacggtcaagcgggcgccgtcggccagtaccgtgtcggcaccggtcagcaccacactggcttcggcgcgcaggcgttgcaccgcagcgcgggcggcggggccggtgatccattggctttcgccgctggccatcgccgtgcgaccgtccaggctcattgccagcttgacccgcacgaacggcaggccgtgttccatgcgtttaaggaagccggggttaagcgcccgcgcttcggcttccagcacaccgctgcgcacctcgatacccgcctgggccagacgctgcatgccccgtccggccacttccgggttcgggtcctgcatgccggccaccacccgcgcgacgccggcggtcaccagcgcatcggcgcagggcggcgtacggccatgatggctgcacggttcaagggtcacgtacaccgtcgcgccacgggccttgtcgcccgcggcgcgcagggcattgggctcggcatggggctcgccggtgcgctcatgccagccttcgccgacaatctgcccgtcacgcactatcacgcagccaacccgcgggttggggtgagtggtgtacaggcccttgcgcgccaattcaagggcgcgggccatgtagtgggcgtcgagcacagcctgttcagaggtcattgtttggagggctcacgggccaggcggtcgatctcttcgcggaactcattgaggtcctggaagcgtcgatacaccgaggcaaaacggatataggcgacttcgtcgagcttttgcagctcgcccatcaccagttcaccgaccaccaggctcttgacctcgcgctcgccggtcgcccgcagcttgtgcttgatatgcaccagcgccgcttccaggcgctcgacactcaccgggcgtttttccagggcgcgctgcataccggcgcgcagtttttcttcgtcgaaaggctggcggctgccgtcggacttgatcagacgcggcaacaccagttcggcggtttcgaaggtggtgaaacgttcaccacaggccaggcattcgcgccggcgacgcacttggtcgccctcggcgaccagacgcgagtcgatgaccttggtgtcgttggcaccgcagaagggacagtgcatggttggcaggcaacaaaaaatgggagggccatggtagcgcatccctgtggcaagacaagccatagcctttacggtatataggcaggcttatatgtttcatattttttaagccacggattttgtcctttctggagccgtacatgcagttacgaccactcgttctactcagcctgttcagttttctggtcgcctgcagcagcgaagcccccaagccggccgcgcctcaaccgacaccggcgcaagagaagaaagtcccgggcattgaagacctcggccccctgcccgcctatcagcgcgaaatcagcggcagcctgaccaatgtgccggccggtgccgaagtcgagatggcgctcttggtgatcgacgagcgttcgcgcccgcagcaactgctcgccagcagcgtactgagcggcaacggcaagcccctggccttccgcctgcgcttcaaccctgaagccttcccggccggtgcccgcgtggaattgcgcggtcgcgccagccagtccggccagctgatcctgcatctgccggccgtgcgcgtcacccaggcgatcacccagagcaccggccccctgcaactcgtcaaggcgccatgacgccaccgctgggcctgcaacacgccttgagcgcgttgattggcgatgcgcaattggtgccctgcccgttgccgggcaccgcgttgtcgttgtggctgctggacgccgacaacatggaccgcgccttcagccaggaagaaacccggcgcatcctgcatgagccgccctactggagtttttgctgggccagcggcctggcgttggcgcgttacctggcggcgcatcccgagtgggtcgccggcaaacgcgtgctggatttcggcgcaggttcgggcgtagccgggatcgccgccgtcaaggctggcgccctggaggtggtggcctgcgaccttgacccattggccttggccgcttgccgcgcgaatgccgaactcaaccaggtggcgctgagttattcggcagacttttttgccgaagccgaccgcttcgacctgatcctggtggccgacgtgctctacgaccgcgccaacctgccgttgctggatcagttcctcacccgcggccgcgaagcgctggtggcggattcgcgggtacgggatttccagcatccggcttaccggcggctggagatcctcgaggccttgacgttgccggacctggctgagccttgggagtttcgtaaggtgagcctgtaccattcgcggcgtgcttgaggccatcgcgggcaagcccgctcccacaggggaatgcatttcaaggtgggagctaccacgatactttcagccaacctcgccagcccttatagttgcccccattcccgctttattcgagacgccccatgagtgagcccacgccgtacatcttcgacgtcaccaccgccaacttcgatcaggccgttatccagaactcgttcgaaaagcccgtattggtcgatttctgggccgaatggtgcgccccctgcaaagcactgatgccaatgctggcgaagattgccgagagttatcagggtgagttgctgctggccaagatcgactgcgaagccgaacaggacattgtggcgcgttttggcattcaaagtctgccgacggtggtgctgttcaaggatggccaaccggtggacggttttgccggtgcacagccagagtcggcagtgcgggcgatgctggagccccatgtgcaaatgccaccgccggctgcggcggacccgttggagcaggctcaggcgctgttcagcgaaggacgcatcagcgaggccgaagcgctgctggtgcagttgttgggcgaggacaacaccaacgccgccgcgctgatcctgtatgcacgctgcctggccgagcgcggtgaattgggtgaagcccaggccgtgctcgacgcggtcaagagcgacgaccacaaggccgcgctggccggggccaaggcgcaaatcaccttcctgcgccaggctgcggacttgccggacgccgccgagctgaaaagccgcctggcgcaaaacccgcaggatgacgaagcggcctatcagttggcgatccagcaactggcgcgccagcagtacgacgcggcgctggaaggcttgctcaagttgtttatccgcaaccgcagctacagcgaaggcctgccccacaaaaccttgctgcaggtgttcgaattgctgggcaatgatcacccgctggtcacggtgtaccgccgcaagttgtttgccgcgttgtattaatcaccgatccaactgtacagcggcgtatccccgccgctgctcaccttcaccttggcgctgtggcgcaggcgcaccagcaggcgcttgcccgccccggcatcgccagccaagccttcgagttgatcgagcaattccagaccattgagttgtccggccttgcgcagcaaatcctgggcgttctgccacaggtcctcgttctgtttgaccggagccgcagtgggcgcgctgggcgttggcgtggcctgcagttgggcacccaatcgcgcccaatcgccgtcgtccagctccagggtcaagtccaccggcaggtcgccgatggttccacgaattcgcaacatcgtccttactcctgcattttttctgacgggcatgctcccatgcagcttgcgcaacaccaagcgggcggtcaaactctcggatcatttgttataagatcacataacaaaactttcatcctggagccctctcatgcgccgtttgctgcttgctttgccgtttgccctgctgccactggctgtcgctcatgctcacgaagaccatgaccacgaacacggcagcctcggcgcccatgaacatggcgtcgggcgcctgaatgccgtgctggacggccaggccctggagctggaactggacagcccggccatgaacctggtgggtttcgagcatgtggcaaccagcgccgccgacaaggccaaggtcgccgccgtgcgcaaacagctggaaaatccatcggcgctgttcaacctgcccaaggccgcaggttgcgtggtcagcagccaggaactcaacagcccgttgttcggtgacaaaccagaagccgagcatgacgacgatgaccacgcctccgacggcaaaggcgccgccgcccacaagcatgatcacgaccacagtgaaatccacgcccattaccagttcacctgcgccacgccggcggccctgggcaacctggacttgagccaagtgttcaagaccttccccgccacccagaaaattcaggtacaactgatcggcccgagcggtcagcaaggtgttgacgcgacggccaccgccgccaccctgaagttctgacttgaaagcacagtccctgtgggagctggcttgcctgcgatacaggcgacgcggtgcagcaggcacaccgtagcgatgccatcgcaggcaagccagctcccacagtggatcggcgccattttcgactaccaggcgacactgacttcccatgactcaagcgttaatcgaactgtccgacctgggcttcaactggcccggtcacccgcagttgctggacatccccgcgttccgcctggaacccggggaaaccctgtttctcaagggcccgagcggcagtggcaagaccactttgctcgggctattgggaggcgtgcagaaacccagccaaggcagcatccgcctgctcggccaggagttgaccgaactctcggccggtgctcgtgaccgtttccgtgtggaccacaccggctatatcttccagcagttcaacctgctgccgtttctgtcggtgcgcgagaacgtcgagctgccttgccacttttccaagctgcgcgcgcaacgggccaagcagcgtcacggcagcgtcgaccaggccgctgcgaccttgctcgcacacctgggtttgaaggaccagagcctgctggaacgccgtgccgattcgctgtccatcggccagcaacaacgggtggccgctgcccgagcgctgatcggccagccggagctggtgatcgccgacgagcccacctcggccctggactacgacgcccgcgaagccttcctgcagttgctgttcgccgaatgccgcgaagcgggcgccagcctgttgtttgtcagccatgaccagagcctggcgtcgctgttcgaccgcaacctgtcgctggccgaactcaatcgcgccgccatgcccgcagaggtttgagatgtatctgttccgtctagccatggccagcctggctaaccgccgctttaccgcgatcctcaccgcgtttgccatcgcgctttccgtctgcttgctgctcgcggtggagcgtgtgcgcgtcgaggcgcgcaacagtttcgccagcaccatcagcggcaccgacctgatcgtcggcgcccgttccggctcggtcaacctgctgctgtactcggtgttccgcattggcaacgccaccaacaacatccgttgggacagctacgagcacttcgccgccagcccacaagtgaaatgggcgatcccgatctccctcggcgactcccatcgcggctaccgggtgatgggcaccaacgagtcctacttcgagcactaccagtacgggcgcaagcaaaacctcgagctggccagcggccgcgccttcgccaccgacccgttcgaggtagtgctcggcgccgaagtggccgaggccctgcattacaaactcggcgacaagctggtgctggcccatggcgtggcggtggtcagcctggtcaagcatgacgacaaaccgttcacggtggtcggcattctcaagcgcaccggcacgccagtggaccgcacgctgcatatcagcctcggcggcatggaagcgattcatatcgactggcacaacggcgtgccggcccagggcaaaggccgcatcagtgccgaccaggcgcgcaatatggacctcacgccgcaagccattaccgcgttcatgctcggcctgaacaacaagatttccacctttgccttgcaaagagagatcaatgaatttcgtggcgagcccatgctggcgatcctgccaggcgtggcgttgcaagaactgtggagcatgatgggcaccgccgaaaaagccttgttcgtgatctcgctgttcgtggtgctgaccggtttgatcggcatgctcacggcgatcctcaccagccttaacgagcgtcgccgcgagatggcgatcctgcggtcggtgggcgcgcggccttggcacatcgcaacgctgctgatcttcgaagccttcgccctggccttgtccggcgtggtagcgggcctgggtttgctgtacctgtgcatcgccgcctcgcggggttatttgcaggccaattacggcctggacctgccgatgtcgtggccgagcgaatatgaatggacgttgctcgccggtatcctggcagccgccctgttgatgggcagcgtgcccgcgtggcgcgcctaccgccaatctttggccgatggcctgtccatccgtttatgaggaaggcttcgatgcgtcgtgccctgtttgccctgttgttgttgatggccgtgcctgcctgggcgcaggagcagcccagggatttgtcctggcaggagatgatcccgccggatgcgccaccagaagtgcccaatatgaagccgctgcacgacctgtcgaacatggccgatgccttgtccgccgaagccgcgccggcggccaagcaggacatgcccaacgcgccggtggtacagagcctggatggccagcatattcgcctgccagggtatatcgtgccgctggaagtcagcgaagaaggccgcactacggagtttctgctggtgccgtatttcggcgcctgcatccatgtgccgccaccgccgtcgaaccagatcgtgcatgtgaaaagcgaggtgggggtgaagctcgatgagctgtatcaaccgtactggatcgaaggcgcgatgcaggtcaagccatcgtccagcgaattggccgacgcgggttaccagatggatgcccagaagatttatatgtacgagctggaggaataacccccaccagcaacacactgaagctcccacaggtttagatcagtgccgaaagtgactgatcaccctttcattgagctgagtcaaaagaccgaacggaacgatctttaccattggacgtacaacttttaaacgtcctttggagctcccatgaacaagtctctgctcggcgcgtccctcttcgcgctcgccctcgtcgcccccgtcgctcacgctcaccaggcgggcgatattctggttcgtgccggtgctattaccgtgaacccgaaggccgacagcggcagcgtcaaggttgaccagggcccgctggccggtaccaacctgggcggcaaggcgaccatgagcagcgacacccaattgggcttgaacttcgcctacatgatcaccgaccacgtcggcatcgaattgctcgcggccacgccgttcgagcacgacgtgaagatcaagaacaccgccctcggtgccgccaacggcaagctcggcacgctcaaacacctgccgccgaccttgagcgtcgtgtactacccgctggatcataagtctgcgttccagccgtatgtgggcgccggtatcaactacacctggatctacgacgaacacgtgggcagccgtgccgaacaggccggtttcagcaacttcaaggccgaaaactcctggggctgggccgcgcagatcggcgccgactacatgatcaacgacaagtggatgatcaacgcccaggcgcgctacatcaacatcagcaccaaagcgactgtggataacaacgcgctgggccaaggcactcgggccaaggtcaatgtggatgtagacccgatggtttacatggtgggtatcggctacaagttctaagtccggttaagccacaccgcataacccatgtgggagggggcttatgtgggagccgggcttgcccgcgatgcagacacctcggtgtatcagtgatacccaggtgatgctatcgcaggcaagccagctcccacataagtcccctcccacttttggttttgggggtgtcagctatggcggtagaagctatccagaagcgccggcaagcctgcccgccatgcccgtggtttgataccaaaggtatgcaggattttcttgcaggccaacaccgcatgctgcggttcatccgccgcatccggccgcgctgcgtgagcctgggcggtgggggactcgatggcgagcggatggaagttgcgcgcttcagtgagaatcgcctggcccagcgccaacggcgtcgtcgcctcgtggccggcgtagtggtaagtgccccacagcggcgcagcgcaatcgagttgcttgagcaccgagatgatcacccgtgctgcatcgtccaccggcgtcgggttaccccggcggtcgtcggccatcagtagctcgtcggcgctctcggcccgggccaggaagcgcccgagcgtgccatcggcgctgtcatcgagcaaccagccaaaccgcagcagtacatgctgcgggcatgtggcgcgcacgctttgttcgatacgccacaacgcctgaccgcgcaggcccaggggcaccggctcgtctttctcgctgtaggcggtggcgcgggagccatcgaatacgcggtagctggacggttgcagcagggtgatgctgtgatgctggcacagctcggccaggcgttcgatggcgaattcctgggcggccaagcgggactcgctcacggcttcggcctggaaccagtcgaaatagtaggcgaggttgatcaaggcatcgggacgggtgtcgtcgagcaattgggtgagacttgcggcatcccagccgtcttggggcggtttgggggcgaggaaaccgatgtcttcctccgcaccgaggcgaatcagcgcctgcccgagggcattcccgccgcccagtaacataaggcgcattcgcatagattgagcaggcccggtctgtttggaacgatggttattatcgacagacgcgtgtgccctgtcgtaggtcattgccagaatcgttgcattttgcgggcttgtagcgcaaccgtcacggattaagtgtcttgacgtcgggttcggcggcctcctgtttcagcgccgcgcgcggtgcgagcaagagctgctgtggataagtctgggcgaagtgcaccgcctcacagttatccacaagctttttcaggcgctggttaaacgcacggctgaccgcgtactggccacccgaaaccgtgcggaactgcgcggtgagcaccacgccattgaggtccatcttgtctaccccgaacacctccaacggcccttgcaggttgtacttgaggaacacatcgtcgcggatcgactggccggcttcgcggatcagctccacggccttgtccacgtcggtgtcgtaggtgaactgcacggagaagaacgcataggcgaactgacgggactggttggtgaccgccttgatctgcccgaacggcacagaatgcacaaagcccttgccgtcgcgcaggcgcagggtgcggatggtcaggccttcgacggtgccggcgtggccggagtcgagcaccacccaatcgccgatggacagggtgtcttcgataatgatgaacaggccggtgatcacgtcctgcaccagttgctgtgacccgaaaccgatggccaggcccaccaccccggcgcccgccagcaacggcgcgacattgatgcccaggttggccatggtggtgatcgcgcagatcaccaccaggatgatcttcaccgcattgcgcagcagcggcaggatggttttgacccgggtactgggctggcgactggagcgtttgttcaccggtggcttgagggcttcctggatcgccgtatcgagcaccacccagaacagccaggtcaccaacaggatcaggccgatactgctgagggagtcactgatggcccggcccacggagttgcgctgggcgaattcgaacagcgaaacaccccagatacgcccgagtatctcgataaacgcgatggccatgacgatgcgcaaaatcgcgtgcagcaaactcaggaagcgttccttgtaggcgctgctgcgctggatcgatacctggctgcgggacttgaacaggtgttgcaacacggtgctgagaaacaccgtgccgatcagtaacaaggtggtgagcagcgcgcagcgcagggcctcttggttatcgtcaccggcgccaatcaggttgaccgccgagaccagcaccatcaacagaatcggccagtaccagagcccggaaaacacccgcaacgattgttgcaatgctggatgtttgaggcgctgggccagcggccgattgcggatcaaatgggccaccggccgacgcaggcggaccaccagcacgccaaagatgaccgcggcaaacaggccggtaaacacggcgatgctgctggtgatattaccgcccagttgccgagcgatttgcgggctggtcagcgcatcgctgagggccgcgagaaagccgatcaggaacagcggcttggggcaatagtcacgaatgatccgcaccgcaggccgcttgtgcccgacgttaaacatgacaatgacgcacagcagcaacgaggtggaaaagatgccactgctggtggcgtaggcaaaacacagcgccagggcgcgaccgacagacgcagctaaaaagtgactgacataaagggtcaacggcaggcagatcagcgctggaatcgtgtagggcaccacatagcccagcaagccttgcagccgttgacgccgcgcaaggaatgcgcggcggctcgcgcgtttcacaaccaggcgccccagcatcgtcagcacagcaaaggcaccggcccacacgccagacaacagcaggaaatcgccggccacgctccacggcgagcgagcggtggtctggtccaccaggcgccctacttcgtctgcggcgcggtcggcccgcaggcgccaggcgtcaatgaggttctggttgaggtcgagcttgtcttgcacgtcatcaatgctggaactgatggccccgagtagcccgccttgcaccagcaattccggcttggccggcgtctcggcagcgggtgccgtcgctgcggcttgcagtgcgccgttaccgcaaagcagcaacgcaccgagcagtaatgcagtctttagattcagcaaaacagcgagctccttcagcagggtctgtaagaaactgacgggtttaggccttgatcgttccccgcatgggcgatgccctccgatcttttcctaccctgtaccgcctgtaggaatgtggaaactttcagccaaatagcgcagtcatcccataacggaggtcacctcacccaccaaccacgggagcacacatggcggcgattcacatcggcatttccggctggcgctacacgccctggcgcggggacttctaccccgaagggctgacccagaaacgcgagttgcagtttgcgtcacgcgccgtcaacagcatcgaaatcaacggctcgttctacgcgctgcaaacccctaagcgctatgccgagtggtatgccgatacgcctgaaggtttcatgttcagtgtcaaggcgccccgtttcatcacgcacatcctgcgcctgcgcgatgtacacaagccgatggcgaatttcttcgcttccggggtgctggaactcaaagaaaaactcggcccaatcctctggcagtttccgcccagcttcaaattcgacgccacgctgttcgaaacctttttggctgaattacctaccgatacccagcaggccgccgccctcgcgcgccagcatgagccgcgccttaacggcaaggcgagcatgaaggcctatgccaagaagccgttgcgccatgccgtggagattcgcaacacgagttttgccgtgccggagttcatccagatgctggataaacacggggtggccctggtggtcgcagacaccgcaggcaagtggccatacatggaagacgtgaccgccaacttcatgtacctgcgcttgcacggcgacaagcagttatacgccagtggctatagcgccgaagcgctccagcgctggggtgaccgcatcgagcgctgggcccacggcaagcagcctgccgatgcacacctggtcgacccgcaccacacgccccgcaggcgtaaacagcgcgatgtgttctgctttttcgacaacgacatcaaagttcgcgcccccttcgatgcacgccaattgctgcaacgtttcgggctggaccaacacctgctcaccgaacctggccggctgccggaaccaggagtattgccatgacacatccagagctgatccccaccccgccgaccaccgccatcacccgctttacagtgctgacggtcaatatccacaagggtttcaccgcgctgaatcgccgcttcatcttgcccgagctgcgtgaagcggtgcgcagtgtgggcgcagacatggtgttcttgcaggaaattcatggcacccacgaacgccatccacagcgctacagcgactggccaaaaatgccgcagtatgaatttctcgctgacagcatctggccgcagtttgcctatggccgcaatgcggtgtacccccatggcgaccatggcaatgcactgctgtccaaatttcagatcatccgctatgacaacctcgacatatcgcaaagcggccatgaaaaccgcggcctgctgcattgcgtgctgcgcctgccgggcagcggtcagcaggtgcacgcgatctgcatccacctgggcttgcgcgaggtgcatcgccaacagcagttgcggttgctggaacaacgtatcagcgagattccggctgatgcgccgttggtggtcgctggcgacttcaacgactggcggcaaaaggccgacctgagccaaagcggtttgcaggaagtgttcatgcacaccctcggtaaaccggcgcgcaccttcccagcacgcctgccgctactgccgctggaccgtatttatgtgcgcaacctgacggtgcacaacccgcgcgtgctcaccactcggccttggtcccatctctcagaccatgtgccgctgtcggtggaggtggagctatgaacgttgcggtagaccatatcgccacagaccaaccgccagacgacagcaaggcgcgggatctggattacggctggcagagcggcaaccaggtgcaattgctggagaacggcgaggcgtactttcctgccgtattcgaggcgttgcgcggcgccgagcgcgagatcctgctggagacctttatcctctttgaagacaaggtcggcgttgagctgcacagcatcctcatcgaggcggccaagcgcggggtgaaggtggtggtcagcctcgacggttttggctgcggcgaactgagcccgggcttcctgcgggagttggccgaggccggggtaatggtgcagatgttcgacccggcgcccaagacccttggcatacgcactaactggtttcgccgcctgcatcgcaagatcgtcgtggtggacgcccgcgtggcgtttatcggcgggatcaatttttctgccgatcacctggcggatttcggccccgaagccaagcaggattactcagtacaggtgatcggcccggctgtggccgacctccaccatttcgccctcgcccaaagtggccgccaggtgcgcagccgtcgcggttggcggcggcgccaacaacggccttcgccctggacgaacgagccaggcgacggcctggtacgtctgatctatcgcgataacatccagcatcgtgatgacatcgaagacgcgtatatccacgccttgagccaggcccggcagcgggtggtgatcgccaacgcgtacttcttccccggctatcgcctgcttcgcgagatccgtaacgcggcacgccgtggcgtgcaggtgcagttgatcatgcagggccagccggacgtgctgttggcgaaactggccgcgcgcatgctctatgactacttgctcaaggatggcgtggtgatccacgaatactgccaacgcccgctgcacggcaaggtggcgctggtggatgacgaatggagcaccgtcggctccagcaacctggacccactgagcctggcactgaacctggaagccaacgtgctgattcgcgaccgggctttcaatcaacagctctacgaacgcctggaagccctcgcccacaatcattgccagaccatgccggaaaagcgcaaaccacgcctgtggctctggcgcttgaccgtgggtttcctggtgtttcatgtgatgcgccatttcccggtactggccagttggttgccggcccacaaaccgcgcttgaaaccttttgaggccgcgccccatgacgtctgaagcccgcccccaagcgcaagcctctgggttcaagcgctggaagaaaccgctgacgattgcgttcttcgtgctgctgatcgtgttgtttaccctgctcgcccggcgcatcgactggagcgaagtgttccagaccctgagcgagttcaagctgcgcacattgttcatcgccggcgcgctgacgctgtgcagtttcattgtctacgcctgttttgacctgatcggccgcacctacattcgccagccgctgcgctggaagcagatattgccggtgggcatcatcagctacgcgttcaacctcaacctcagcgcttgggtcggcggcattgccatgcggtaccggctgtattcgcgcctgggcgtgagcaccagcaatatcgccaagatcctcggcctgagcctggccaccaattggttcggctatatggcgttggccggggtggtgttcagcagcgggttggtgaccctgccgccaggctggaagctcagcagcggcgccttgcaaggggtcggggtgttattggtgctcgcgagcctgggttacctggcggcgtgccggttttctaaaaagcgcgcgtggtcgattcgcggtatcgagatcaacttgccgtcgctgcgcatggcctgtttgcagctggctctgggtgcgttgaactggtcgttgatggccgcagtgatattcaccttgctgccggccaaactggattacccgttggtgctgggggtgctgttgatcagtgcgattgccggggtggtcacccatatcccggccgggttgggggtgttggaggcagtgttcattgcgctattgcaacatgaggcgtcgcgggggagtttgctggcggggctgatcgcgtaccgggcaatttattttatttgcccgttgttgattgcactggtgatgtatttgggggtggaggccaaggccaaggcgttgcgggtgaagaagacagcctgatgagacggtggtgactgttgaatcgctatcgcgggcaagcccggctcccacaggggaatgcattccaaagtgggagccgggcttccccgcgatagcgatcacgaggacaacgactatcgggcctgaatgatgctcaaccgctcccccaccaccatctcggtaatccagtccaccagtatcgaggtatacgcctgttgcgacaccgggtcgctcagggaatggtcggcgccgtcgatgatgcggtgggtcagggagtgggtctgctggcacgccgcgcggtaactcatgatggtggcgtggggcacatggtcgtcggtttccgactcgacaatcagcacatcgccggtaaattgcgcgcaggcatgcagggcccggttggtttcggcgtgcacgagggtgccgcggtaatccatcaggtcggctttgtccaagtcgcgcttgggcttgagccattcctggtcgcggtacagcgccggcactcgcagcgccagccaacgcaccgggcgcaatgaggtgaggatcgctgccaggtagccgccataactggtgcctaccaccgccaccgccgaggtgtcgatcgccgggtgggacagcaggcggtcataagcggccagcaggtcgcgcaggttgtcttcgcgggtgacgcgggacaaggggatgccggtgccagcatgaccacgcaggtcgaaggtcaggcacacacacccaaggcctgcgatacctttggcccgctccaggtcgcgctcctggctaccgccccaaccgtgcacgaacaacacaccgggcactttggacttggggctgaggaaggtcccgctcatttgttcgtcgtctatatcaatgctgatgctctcgcttctagccgtcataagtcttgaccgtcacatacttgagtagaaagtcgctgttttcggccgggcctcggtatacctcgatggcatccgccggcagcgcttggtctatataggtttctaccgaggacacacggatggccttgaggcccggatggttgataaagctctgcagcgccgcgacttccgcgctgctggccccgcccatgcgccaggattgttcgagcacgccactgcggcgctggcctgtgctgtccaggccttgggcgatgtcgtagttgcggcgcgaggcgaagaagcctgggtaggcctcattcgcagcacggtcgaacaccagcgcctgttcgatagccttatgcacgtcttcaggcagattcagtttgagcagcgctgcataatcaccggggacgaccagcagatcggaaccgccgtagacctcttcccccagcccgtcttgcgtcaggtgctgctcgccgcagtagctgaagaggtgatcgccgataaaactctggcccacactatgggtgaccacctcgtgcaggtcttgttccagcaccacgccttgattgaacattccggccgcttccgggcgcgccactatcgcgtcgaactcatccaggctgtggataacttcctgcccccgccctgcacaggcatttacgggtttcagacgaatcgggccgctgtagagcaagcgggtcgcggcaggccgcgcgtcctcaagggcgaacacactcacgccgtccaacaccacgtcacgcacacgctcgcagaatgtcggcgaccagccttcgggcgccttggcctcaggactcagcaggccgtgactgatggctttggtgcagatgaaagcgtgatcgacatagccgccccacagatcttgtggcccctcgatattgagcaggcgcgcttgggcgggcccgaccagggtttgcgtgggcagcagatacaattcccgacccgcatgcagggccgggtcgtaactgccaccgaacttgagccccaggatctgcgccagccagcgtgcgagggcgcggttggtttcgatttcatgcaagggcgcgccttctcgcatggagtgggcaaccactagcttcttgttgcgacttatgggggtcatgcgttcccctttctatcagccgttgtgtagcaggagggctgcatggatcaggccaacgtagggtttgcgggcgtggctgttaaatcaatcagttgcgcccaaagtgatggccgttagcctgttttattctgcacgacccgaggttaaccctgcggcgttctgcacgattcaaaccccaaagcggttgcggtaatcgctgggggacaagccggtgattttcttgaaaatggcgcgaaaggcgctggggtcctgatagcccacggtccaggcaatgtgatcgatcgtgccgttggtgaactccagcatctgccgtgccttaccgacacgcaggtgctggcagtactcggtgggtttcaacccggtggcgttgcgaaagcgccgcaggaaggtacgctcctccaggttggcctcctgcgccatcgccgccacggacacatccaccgcgccactggcttgcagccaatgctggaccttgaggactgcaccatcaccgtgcctgagaagcggcgcaaagttgctaccacattggctggcgctggcgctgtgttcgatcaccagaaaacgcgccgtatcggccgcaacgctcgggcccatcagccggtcgaccaggcgcaggcccagttcggaccaagccatcagccccgcggaagtgatcaagtcgccgtcatcgacaatgggtttatccgcttccaggcgcaccgccgggtaactggccgcaaaagacttcgcggaggaccagtgggtggtggcgctgcgaccatccaacaagccgctgcgcgccagcatgatcgaaccgatgcacacaccgcccagcacggtgccggctgcatgttgctggcgcagccattgcagcagtgcaggcggcgcctggtcttcggtgaactcggcaatcgagggcggcaccaacacggccatcatcggttggtcggggcctgggtggctgtcgaacgtgcgcgcgggcatgccgcgggcatctacctgccagtggctgacccgcagcagcggcagttgcgcagattcatgctcggcggcgatgcggttagcgaccccgaacaggtcggtcagcccgtggactgcggcgagttgcgcgccctggtagatcaacacacccagctcgacagtgctgcgttgcgcggccattgtcagttttccccctgttattgtcggtgcagccaatcctcggcgcggccgccagataagatactaggcccatcaacccatcacgaggcaacacacatggccaagcaggcgctcatcctaatcgatatccagaacgactacttcccccagggcaagtggccgctcgacggcgtggaagccgcagcggacaaggcagcgcaggtgctacaggcgtttcggcaagcaggcgatgcggtgattcatgtacggcatgagttcgctggcgacgacgcaccgttcttcacaccgggctccgaaggcgcgcatttgcatgccaaggtgctcaacgagggcgatgaaccggtggtgctcaaacacttcgtgaatgcgtttcgccaaaccaacctgcgcgaactgctggaacggcgcagcatcaccgacgtggtggtggtgggtagcatgagccatatgtgcgttgacgccgtggtgcgggcagcggcggacctgggctacaaggttacggtgattcatgatgcctgcgcgacccgcgaccaggaattcaacggccaggtgattccggcggcgcaggtgcacggcgcgtacatggcctccctggcctttggctatgcgggtgtggtgtcggcagaggaatatttgaaggcccaagcagcggccgcgtgaccgccacccgggctgatcgctttagcgcgtggcaatgatgaacagccgcggaaaaggcaacaacaccgtgccatcggccagggctggataagcctgggtaattcgcgcctggtattgctgcaggaaggcggctttttcatcgtcggtcaacggcgcaagaaaaggccgcaatgccgaagccttgaaccactccaccaccgccccgtggtccgccaacgggtgctgataggtggtgcgccacacatccacggtactgcaatgcttgctcagcagttcgtagtagtaactggcggtgtgccgttcattgtgtttgaccgccccaatcttggccgcccatgggccatcggccgcaacttcacgggccaggcgatgggcgggctcgtcaaggttgtccggggtttgcaccgccagcgtaccgcctgggttcagttggtggaccaagtgcgggtacagcgtggcgtgatcgggcagccattgcagcgaggcattggccaggatcacatccaagcgttgcgccggatgccaggcgccgatgtctgccagctcgaagttcaacctgggcaggcgcttgcgggcgtccagcaacatgtcatcggagctgtccatgcccgtgacgtgcgcttgggggaaacgctcggccagtacttcggtggagttccccggcccgcaacccaggtcgacggcggtgttcacgtcggtgttgggaatggccgccaccaggtcacggacggggcgagtgcgctgctgttcgaacatcgtgtactgcttggcggaccaggtcatcacagctttccttcttgctagaggtggcgacagcctaaatcttgtgagccatgagaacaaatgctggggttggtgtgctgtttgcacaaaggcatcccgtgcaccgacacctgggcattgcccataaaaaacccccgatgctttcgctatcgggggttttgtttgttcagggtcggtcttggaccttagaacgggatatcgtcatcaaaactgtcgaaatccggagccggttgcggagcagcctgttgtggcgctgggcgcgactcacgctgtggctgctggcttggctgcggacgcgactgctgtgggcgcggtgccgagttggacatgccgccctggccctgttggtcgccctgtggacggccgcccagcagttgcatggtgccttgcatgtcgaccacgatttcggtggtgtaacgcttgatgccgtctttttcccactcacgggtttgcagtttgccttcgatgtacacctgcgaacctttgcgcaggtattcaccggcgatctctgcgaccttgccgaacaacgacacgcggtgccactcggttttctctttgcgctcgttggtctgcttgtcggtccactgttcgctggtcgccaggctcaggttggtcacagcattaccgttaggcaagtagcgaacttcgggatcctggccgcaagtaccgaccaatatgactttgttaaccccacgggccataacgttctcctaggctgggcgcgctgtcggcactgggttgaccagttgctcgagcgtcgcgcgatccaataattcggtgtccaatttgatgtaaatggccgcctcttcagcgaccaccactgcatccgttacccctaccacggccttcaggcgctcgaccaggccggcttcgcggatcgcctcgggcgatagcggcaaacgcaggctggtgacgtagggaggttcgcgcatggtaacagcaaagaccagccaaagtgcagccagcgcggcgcatccaaggaacacaaccgacaaaccgccatgctggaacatccagccgcccatgataccgcccaacgcggagcccaggaactggctggtggaatacacccccatggccgtgcccttgccgcctgccggtgaaactttactgatcagtgacggcaacgacgcctcgagcaggttgaacgcggtgaaaaacaccaccgtgccgatcaccagtgcgcgcaggctgtcgccgaactgccagaagaatagttcagtgagcatcaatgtcgcgacggcgccgagtaaaactcgtttcattttgcgtttcttctcgccatagatgatgaacgggatcatggcgaagaacgaaatcagcaacgcagtgaggtagacccaccagtgctgctccttgggcagcccggctttttccaccagggccaggggcaaggcgacgaagctgcacatcagcatggcgtgtaatacgaagatacctaaatccaggcgcagcaggtccgggtgcttgagcgtcggcagcaacgccttgcgtgcaacgcccgattcacggtgcgccagggtgccggtggagcgcggcaccataaacgccacaatcaggatgccgaacaacgccatgccgcccgtggccaggaacagcccatgcaagccgaacgcgcgcgtgagcaaggggccgaccaccatggccacggcaaacgacaggccgatggtcatgccgatcatcgccatggccttggtgcggtgttgttcgcgggtcaggtccgagagcagcgccatcacggcggcggagatcgcaccggcgccctgcaggatgcgcccggcgatcacgccccagatcgaatcggattgggccgcgagcacactgccaagggcgaatacgatcagcccgagatagatcaccgggcgacggccaatgcggtcggaaataatcccgaacggaatctggaaaatcgcctgggtcaggccataggcgccaatcgccaggccgatcaaggcgggggtggcgcctgcgagatccatcccataggtggccagcaccggcaacaccataaacatgcccagcatacggaaggcgaacaccagggccagcccgcttgccgctcgggtctcgccgctactcatgcgttcgctgtggggatcgtgcatggaaaaacctcgtgtgaaccggcggcgattctaccagtcccatcgattgagagggtatatgcggcgctttgccgcgcagctttcatgtaaggctgcaagcggcgttttgacagtgtatattcatccagtctttagccgtatactccggcatcatttacgcccgccgtgcgaggccatcttggacaagatcctgattcgtggggctagaacccacaacctgaagaacatcgacctgaccctgccccgggacaaactgatcgtcatcaccggcttgtccggctccggcaaatcgtccctggcgttcgacacgctgtatgccgaaggtcagcgtcgctatgtggaatcgctgtcggcctatgcccggcagttcctgtcgatgatggaaaagcccgatgtcgacaccattgaaggcctgtcgccggctatttccatcgagcagaagtccacgtcccacaacccgcgctctaccgtgggtaccattaccgagatctacgactacctgcgcctgctctacgcacgcgtgggtatcccccgttgcccggaccacgatatccccctggaagcccagaccgtcagccagatggtcgacctggtgctggcccagcccgaaggcgccaagctgatgctgctggcgcccgtcattcgcgagcgcaagggtgaacacctgtcggtcttcgaagagctgcgggcccagggcttcgtgcgagcgcgcatcaacggcaagctctacgagctggatgaagcgccgaagctggacaagcagaaaaagcactccattgatgtggtggtggaccgattcaaggtgcgcgccgacctgcagcagcgtttggcggaatcgttcgaaaccgcgctgaagctggccgatggcattgccctggtagcgccgatggatgacgagccgggcgaagagatcatcttctccgcgcggttcgcctgcccgatttgtggccatgccatcagtgagctggaacccaagctgttttccttcaacaacccggccggcgcctgcccgacctgcgacggcctgggtgtgaagcagtttttcgatatcaagcgcctggtcaatggcgaactgaccttggccgagggtgcgatacgcggctgggacaggcgtaacgtctactacttccagatgcttgggtcgttggcgtcccactacaagttcagcctggaagtaccgttcaaccaattgccggcagaccagcagaaggtcattctcaatggcagcggttctcagaacgtcgacttcaagtacctgaacgaccgtggcgatatcgtcaagcgctcgcacccgttcgaaggcatcgtgccgaacctggaacgccgctaccgcgaaaccgaatcggcgagcgtgcgcgaggagctggcgaaattcctcagcacacaaccttgcccggattgccgtggcacgcgtctgcgccgtgaagcccggcatgtatgggtaggcgagaagaccctgccggcagtgaccaacctgccgatcggcgatgcctgtgaatactttggcgtgctgaagctgaccggtcgtcgcggggaaattgccgacaagatcctcaaagagattcgcgagcgattgcagtttctggttaacgtgggcttggactatctgtcgctggaccgcagcgccgacaccttgtctggcggtgaggcacagcgcattcgcctggccagccagattggcgccggtcttgtgggcgtgctgtatatcctcgacgagccgtcgattggcttgcaccaacgcgataacgaccgcctactgggcacgctcaaacacctgcgcgatatcggcaataccgtaatcgtggtcgagcatgatgaagacgctatccgcctggcggactacgtggtcgatatcggccccggcgcgggcgtgcatggtggccatattgttgctgaaggcacgcctgccgaggtgatggcacatcctgattcactgaccggcaaatacttgtccggccgtgtgaaaattgaagtacccgccaagcgaacgccgcgtaacaagaagatggcgctgcatctcaagggcgcgcgcggcaacaacctgcgcaatgtcgacctggagattccgctgggcctgctgacctgcgtgaccggtgtttccggttcgggcaagtcgacgctgatcaacaacaccctgttccccctgagtgccaccgccctgaacggcgcgaccaccctggaagcagcggcccacgacagcatcaagggcctggagcatctggacaaggtggtcgatatcgaccagagcccgattgggcgtacgccgcgttcaaacccagccacctacaccgggctgtttacgcctatccgtgagttgttcgctggcgtgccagagtcgcgctcacgaggttatgggccaggccggttctcgttcaacgtcaagggcgggcgctgtgaagcgtgccagggcgatggcctgatcaaggtggagatgcacttcctgccggacatctacgtgccgtgcgatgtgtgcaagagcaagcgctacaaccgcgagaccctggagatcaagtacaagggtaagagcattcacgagaccctggaaatgaccatcgaggaagctcgcgagttcttcgacgcagtgccggcgttggcgcgcaaactgcagacgctgatggatgtgggcctgtcgtacatcaagctggggcagtccgcgaccacgctgtcaggtggcgaggcgcagcgggtcaagctgtctcgcgagctgtccaagcgcgatactggcaaaaccttgtacatcctcgatgagccgaccactggcctgcactttgcggatatccagcagttgctggacgtactccaccgcttgcgggaccacggcaataccgtggtggtgatcgagcacaaccttgatgtgatcaagacggccgactggctggtagacctggggccggaaggtggctcgaagggtggccagatcatcgcagtgggcacgccggagcaggtttccgaaatgcctcagtcgcacaccggttactacctgaaaccattgctggaacgcgatcgggcctgatcttttcatcgtccaataaaaagcccctgtcactttgcggtgacaggggctttttatagccgggaatcagaactgcgattgcaggtaattctccaggccgatcagcttgatcaggcccaactgcttttccagccagtaggtgtgatcttcttcggtgtcattcaactgcacccgcagtatttcccgggtgacatagtcgttgtgctgctcgcaaagctcgatgcccttgcagagtgcggcacggaccttgtactcaaggcgaagatcggcagcgagcatgtcaggcactgtggtacccacgtccagatcatcaggacgcatacgcggcgtgccttcgagcatcaggatacggcgcatcagggcgtcagcgtgctgtgcttcttcttccatctcgtggttgatacgctcgtagagctcagtaaagccccagtcttcgtacatacgcgaatggatgaaatattggtcacgagctgccagttcgcccgtcagcaacgtgttgaggtaatcgattacgtcggggtgaccttgcatcgccctacatctccctgcttgaaagactgtagtttgaaccatgctgacttgaaggtcacgggacaaacggcagaaaagtgaagatttccggagaaaagtagctgaaataacgcaaaaaccgcccaaatgagggcggttctgcttatcgtttagagtcagttaagcgatacacccagtgcctttgcgattgcttctccataagccgggtcagccttatagaagtgctgcagttgacgctggaccacgtcgctggaaacgccacccatagcaccggcgatgttattggtgagcagggctttctgctcatcattcatcagacggaacagcgcaccggcgtggctgtagtagtccgtgtcttcacgatgatcgtagcgatcagcggcgccgctcagggccagtgccggctctgcatactgcggggcttgtttcggtgcatcggcatagctgtttggctcgtagttcggagccgcaccgccgttactaccgaaagccatggagccgtcacgctggtagctgttaaccgggctacgtggcgcgttcaccggcagttgctggtggttggtgcccacacggtagcggtgcgcatcagcgtaggcgaagacccggccttgcagcatgcggtccggcgacaggccaacgcctgggaccatattgcttgggccaaatgcggcctgctcgacttcggcgaagtagttctgcggattacgattgagctccaactcacccacttcaatcaaagggaattctttttgcgaccaggtcttggtcacgtcaaacgggttctcgtaatgagcgtttgcttgagcctcagtcatgatctggatgcagacgcgccatttcgggaagtcaccgcgctcgatcgcaccaaacagatcacgctgggcgtagtcagggtcggtacccgccaggcgtgcagcctcggccggcgccaggttcttgatgccttgcttggtcttgtagtgccacttcacccagtggcgttcgcccttggcgttgatcagactgtaagtgtggctgccgaagccgtgcatgtgacggtagccgtctgggatgccacggtccgaaaacagaatggtgacctggtgcagcgcctccggggaatgcgaccagaaatcccacatcatttgtgcgcttttcagattgctttggggcagacgcttctgggtgtggataaagtcagggaatttcagcgggtcacggataaagaacaccggggtgttgttaccgacaatgtcccagttgccttcctcggtgtagaacttcaaggcgaagccacgtggatcgcgctcagtgtcagccgaaccacgctcaccgcctacggtagaaaaacgcaggaacgtaggcgtctgcttgccaacggactcgaacaacttggcgctggtgtactgggtaatgtctttagttacagtgaaggtaccgtaggcacccgaacctttggcgtgcacgcgacgctcagggatgttttcacggttgaagtgcgcgagcttctcgatcaggtgaaaatcgtcgagcagcaaggggccacgtgggccggcggaacgtgagttctggttgtccgcaacgggtgcgccgctggcggtggtaaggactttattctggctcatgcgcaatcttcctcaggtcggacttggaactgccggctaatcggcttggagggagtattgaccatccacatggcacctacaaattcattaaattgtaggcatcaatagaaaataactaccaacatacccaacgctcatagtgaagcgtgtcgcttgaggattcttgtacgcagcgcgcttttgttacgcgcacaaaaaaccgggcactaggcccggtttctcgttgcagcttgtcgtcttactcggcgcttacagcttcgccggcagtagcacgatcaaccaactcgacgtacgccataggcgcgttgtcgccagcgcggaaaccgcacttgaggatgcgcaggtagccaccctcacgggtagcgtaacgcttgcccaggtcgttgaagagcttaccaacgatagctttcgaacgagtacggtcgaaagccagacggcggttagccaggctgtctgtcttggccaaagtgatcagcggctcagcaacgcgacgcagttctttagctttcggcagtgtagttttgatcagctcgtgctcgaacagcgacaccgccatgttttggaacatggccttgcggtgcgagctggtacggctcaggtgacgaccacttttacgatgacgcatggttcattccttaccaaactcacgttcggtgattacgacgatcaggcagtcgccttgtcgtccttcttaagacttgcaggcggccagttgtcgaggcgcatgccgagggacagaccgcgggaggccagaacgtccttgatttcagtcaaggatttcttgcccaggttcggagtcttcaacagttctacttcggtgcgctggatcaggtcaccgatgtagtaaatgttttccgccttaaggcagttagccgaacgtacagtcagttccagatcgtcaaccgggcgaagcaggatcggatcgatctcgtcttcctgctcgattaccactggttcgctgtcacctttgaggtcgacgaacgcagccaactgctgttgcagaatggttgcagcgcggcggatagcctcttcaggatccagggtaccgttggtttccagatcaataaccagcttgtccaggttagtacgctgttcgacacgggcgttttccaccacgtatgcgatacggcgaaccgggctgaacgaagagtcaagctgcaagcgaccaatgctgcggctttcgtcttcatcgctctgacgcgagtcggccggttcataaccacgaccacgagctacagtgagcttcatgttcagggcgccgttagacgccaggttagcgattacgtgatcggggttaacgatctcgacatcatgatccagctgaatatcggcagcggtaaccacccccgaacccttcttcgacaaggtcagcgtaacttcgtcacggccgtgcagcttgatagccagacctttaaggttcaacaggatttcaattacgtcttcctgtacaccttcgatggcgctgtactcgtggagcacaccgtcaatctcggcctcgactactgcacagccgggcattgaggacaacaggatgcggcgcagcgcgttgcccagggtgtggccaaaaccacgctcgagaggctcgagagtaattttggcgcgggttggactgacaacctgcacatcaatgtggcggggtgtcaggaactcatttaccgaaatctgcatggatgcacctattttctagcccttacttggagtagagctcgacaatcaggctttcgttgatgtcggcggacagatcactgcgagcaggaacgttcttgaaaacgcccgacttcttctcagtgtctacttctacccattctacgcggccacgttgggcacacagatcgagagcttggacaatgcgaagttggttttttgctttctcgcgaactgcgaccacgtcaccagcacgaacctggtaggacggaacgtttacggtctgaccgttaacgctgatcgacttgtgcgataccagctgacgggattcggcacgagtcgaaccaaagcccatacggtatacaacgttgtccagacggcattcgagcagttgcagcaggttttcaccggttgcacctttcttgccagcagcttctttgtagtagccgctgaactgacgctcgagaacgccgtagatacgacggaccttctgcttttcacgcagttgggtgccgtagtcggactggcgaccgcggcgttggccgtggataccaggtgctgcttcaatgttgcacttcgattcgatcgcgcgcacgccgctcttcaggaagagatcggtgccttcgcgacgagcgagtttgcattttggaccaatgtaacgagccattctttacaatctcctggattacacgcggcgcttcttcggcggacggcacccgttgtgcgggattggcgtcacgtcggtgatgctggcgatcttatagccacagccgttcaaagcacggacagcagactcacgacctggacctggacccttgacgttaacgtcgaggtttttcaggccatattccagcgcagcttgaccagcacgttcagcagctacttgagcagcaaacggggtggacttgcgggaaccgcggaaacccgaaccaccggaggtagcccaagaaagcgcgttaccttgacggtcggtgatggtcacgatggtgttgttaaaagatgcatggatgtgggcgatgccatcaaccactgtctttttaacttttttacgaggacgagcagcaggttttgccatgataattttcctgtcgattcgctggggcgattacttgcggatcggcttacgcggacctttacgggtacgcgcgttagtcttggtacgctgaccgcgtactggaagaccacgacgatgacgcagaccgcgatagcaaccgaggtccatcaaacgcttgattttcatgttgatttcgcgacgcaggtcaccttcagtggtgaacttcgccacttcgccacgcagctgttcaatctgctcgtcgctcagatccttgatcttagcggctgggtttaccccagcgactgcgcaaattttctgcgcagtagtgcgaccaacaccatagatgtaggtcagcgagataacagtgtgcttgttatctggaatgttaacgcctgcaatacgggccattcagtgggactccaattgacagctacctacgccccggaagccaagaaatagggcgcgagataatatcgctgtaataacaaataatcaacccggcagcgcactagctgccgggcttcaagcggatcacactcagccttggcgctgtttgtgacgcggttccgcgctgcaaattactcgaacaacaccttcgcggcgaataatcttgcagttacggcacagctttttcaccgatgcacgaactttcatcaccaactcctcgaaccttatggggtactcagcgcaacatgccgctgccgtagcccttcaggttggctttcttcatcagggattcgtactggtgcgaaacgaggtgcgattgtacttgggacatgaagtccatcacaaccacgaccacgatcagcaacgaggtcccgccaaggtagaacggaacgtttgctgcaaccaccaggaactggggcaacaggcacacggccgtcatatatagagcaccgaacagggtcaaacgagtcagaacgccatcaatgtagcgtgccgactgctcacctggacggatgcccggaataaaggcaccggacttcttcaggttttccgctacgtctttcggattgaacatcaacgccgtatagaagaagcagaagaaaataatccctgcactaaacagcagaatattcaacggctgaccaggagcgatcgactgagagaggtcctgcagccagcccatattttcagactgaccaaaccaggtacccaacgaagccggaaacagcaagatgctgctcgcgaaaattgccggaataacaccggccatattcactttcagcggcaagtggctggtctgcgcagcaaagaccttacggccctgctgacgcttggcgtagtgaacagcaatacgacgctggccacgctcaatgaacaccacaaaaccgataatcgctactgccagcaaaccgatggcaaccaaggcgaagatattgatatcaccctgacgcgcagactcgaaagactgcccgattgctctcggaagaccggcgacgatacctgcgaaaatcaacatcgagataccgttgccaacaccacgctcagtaatctgctcacccagccacatcatgaacatcgcaccagccacaaacgtggatactgcgacgaaatggaagccaaagtcaccagtgaacgcaacgccctgcccggccaggccaacggacatgccgatagcttgaaccagggcgaggacgacagtgccgtagcgggtgtactggctaatcttgcgacggccagcttcaccttccttcttcaactgctccagctgcgggctgacggctgtcatcagttgcatgatgatcgatgccgaaatgtacggcatgatccccagtgcaaagatgctcatccgctccagcgcgccgccggaaaacatgttgaacaagctaagaatggtcccctcattctgtcgaaacaggtctgcgagtcggtccgggttgatacctggaaccgggatgtgtgcgcctattcggtagacgataatcgccaggaacagaaaacgcagacgagcccaaagttcagacataccgcctttgccgagcgctgagagagcaccttgcttagccatttattcctcgaacttgccgccagctgcttcgatagccgaacgcgcacctttggtggcgccgattcccttgccgatagtgacagcgcgagtcacttcaccggacagcatgattttcacacgctgtacgttgacgttgatcacgttggcatctttcagggtctgcacagtaacgatgtcgccttccactttagccagctcggacagacgcacttctgcgcgatccatggctttcagggatacgaaaccgaacttaggcaggcgacgatgcagcggctgttgaccgccttcaaagcctggagcaatggtgccaccggagcgggaggtttgacccttgtggccacggccaccggtcttacccaaaccactaccgataccacggcccggacgatgcttttcgcgacgggaacccggcgctggactcagatcattgagtttcatcgattaaccctctacacgcagcatgtagtaagccttgttgatcatcccgcgattctcgggagtatcctggacttctacagtgtgaccgatgcgacgcagacccaaacctttaacgcacaatttgtggttagggatgcggccggtcatgcttttgatcagcgttactttaacggtagccatgatcagaagatctccttgacagtcagaccacgcttggcagcgatggactcaggagattgcatagccttcagacccttgaaagtggcgtgaaccacgtttactgggttagtcgagccgtagcacttggccagaacgttctgaacgccagcaacttcgaggacagcacgcatagcgccgccagcgatgataccggtaccttcagaagcaggctgcatgtacaccttcgaagcgccgtgagcggacttcattgcgtactgcagagtggtgccgttcagatcaacttggatcatgttgcgacgagcagcttccattgccttctggatcgcagcaggcacttcacgtgacttgccacggccgaagccaacacgccctttaccatcacctaccacggtcaacgcggtgaaagtgaagatacggccgcctttaacggttttggctacgcggttaacttgaaccagcttctcaatgtagccttcgtcgcgcttttggtcgttatttgacataacttagaactccagcccagcttcacgagcagcatcagccagcgctttcacgcgaccgtggtacttgaagccagagcggtcgaaagccacttgcgagacgccagcggccttagcacgcgtagcgaccagctggccaacctttgtggccgcgtcgatgttgccagtggcaccatcacgcagttctttatccaaagtcgaggcgcttgccaggactttgttgccgtcggccgagatgacctgggcgtagatgtgctgcgacgagcggaacacgcagagacgcacgacttcgagttcgtgcattttcaggcgtgctttgcgagcgcgacgcagtcgagtaacttttttgtcggtcatttgctatgccctacttcttcttggcttctttacgacggacgacttcgtccgcgtagcgcacacctttgcctttgtacggctctggtggacggaagtcgcggatctcagcggccacttgacctaccagctgcttatcgatgcccttgatcaggatatcggtctggctaggagtctcagcagtgatgcccgctggcagttcgtaatccactgggtgcgagaagccaagggcaaggttcaaaaccgtgccttttgcttgcgctttgtaaccaacaccgaccagctggagcttacgctcgaagccttggcttacgccttggaccatgttgtttaccaacgcacgcgtggtaccggccattgcgcgagtttgttgatcgccattgcgagcagcgaaacgcagctcaccagcttcctcaacgatctcaacggacgaatggatgttcagttcaagagtacccttggcacccttcaccgaaagctgttggcctgcgaatttgacttcgacaccggctggcagcttaacggggttcttagcgacgcgagacatgcttatccccccttagaacacagtgcaaagaacttcgccgccgacaccggcagcgcgcgcagcacgatccgtcatcacacctttgttggtggagacgatagacacgcccagaccgccacgaactttcggcagatcttcagcggacttgtactgacgcaggcctggacggctaacgcgcttcacttcctcgatgaccgaacggccttcgaagtacttcagctcgatggacagcagtggtttgatttcgctgctgatctgataacccgcaatgtagccttcgtctttcaggactttggcaacagctaccttcaacttggaagatggcatgcttacgacggacttttcagccatctgggcattacggatacgagttagcatgtccgctaacgggtcctgcatactcatgggctagacgctcctaatacaaaaaaattagccttgcggctacatatgtcgccgagaatctccgagcacaaaaaacacgggctcaggcgagccgcgtattttagacatactccagaaatgaaacaagccccaaaaggggcttgatccagattcaaggtcaccggcggtcagtatcttgcgattccgaccacctggacgttgaaagtacttaccagctggctttaaccagacctggtacgtcaccacgcattgccgcttcacgcagtttgttacggccgaggccgaacttgcggtaaacgccgtgtggacgaccggtcaggcggcagcggttacgcatgcgcgaagcgcttgcgtcacgtggctgcttctgcagagcaactgtagcttcccaacgtgcttctggacttgcgttcagatcaacgatgattgctttcagtgctgcacgcttcttggcgtacttggcaaccgtgagctgacgcttcagctcgcggtttttcatgctcatcttggccatggtcctactccaatcagttgcggaacgggaatttgaaagcacgcagcagggcgcgaccttcatcatcgttcttggcagtggtggtcagggtgatgtccagaccgcggagagcatcgatcttgtcgtagtcgatttccgggaagatgatctgctctttcacgcccatgctgtagttaccacgaccatcgaaggacttggcattcaggccgcggaagtcgcgaacccgaggcagggagatcgacagcagacgatccaggaattcgtacatacgctcacggcgcagagtcactttgacgccgatcggccaaccttcacggactttaaagccagcgatggatttccgagcgtaagtcacaacgactttttgaccggtgatcttttccaggtcggcaacagcgtgctcgatgacttttttgtcgccgatcgcttcgcccagacccatgttcagggtgattttggtaacgcgcggaacttccatcacgttcccgagcttaagttcttccttaagcttaggggcgatttccttccggtaaatctcttgtagtcgtgccatggtctaatctacctagcagtgttcaagcatcaaccgctttttgggtcgacttgaagacacgaattttcttaccgtcttctactttgaaaccaacgcggtcagccttgttggtttcgccgttgaagatggcgacgttagaagcatccagcggagcttctttctcgacgataccgccctgcacgcccgacatcgggttaggcttggtatgacgcttgaccaggttcagaccaccgataaccagacggttattagcgagaaccttaagcaccttaccgcgcttacctttgtctttgccggcgatcacgatgatctcgtcgtcacgacgaatcttttgcatgtcggatctccttacagcacttctggggcgagcgagacgatcttcatgaacttctcagtacgaagttcacgggtcactggcccaaagatacgggtgccgatcggctcttgcttgttgttcagaagaacagcagcgttgccatcaaagcggataatggagccatcagcacgacgtacgccgtgacgagtgcggactacaacagcagtcatcacttggccttttttcaccttaccgcgaggaattgcttccttcacggtaactttgatgatgtcaccgataccagcgtaacgacgatgggagccacccagcaccttgatgcacataacacggcgagcgccgctgttatcggccacatcgagcatggattgagtctgaatcatataatttctccgacccctagtccttagacttccacagcgcgttcgagaacatcaaccagtgcccaagacttggtcttggccatcggacgagtttcacgaatagtgactttgtcgccgatgtggcactgattggtttcgtcgtgcgcgtgcagcttagtcgaacgcttaacgtatttaccgtagatcgggtgcttaacgcgacgctcgatcaaaacggtgatggttttgtccatcttgtcgctgacaacacggccagtcagcgtacggacagtcttttcggcttcagccatgatcacttacctgcctgctggttgagcacagtcttcacgcgagcgatgtcacgcttaacttgcgagagcagatgagactgccccaactggccagttgctttctgcatacgcagattgaactggtcgcgcagcaggccgagcagttgctcgttcagctgctgtgcggatttttcacgaagttcattcgctttcatcacatcaccgtccgtttaacaaaggaggtggcgagcggcagctttgcagcagccagggcgaaagcctcacgcgccagctcttcagaaacaccctcgatttcatacaggactttgcctggctgaatctgggctacccagtattccacgttacccttacctttacccatccgaacctcgagaggttttttggagatcggcttgtccgggaatacacggatccagatcttgccgccacgttttacgtgacgggtcagagcacgacgcgctgactcgatctgacgagcggtgagacgaccacgagctacagacttcagcgcgaactcgccgaagctgactttgctaccgcgctgagccagaccacggttgtggcctgtcatctgcttgcggaacttcgtacgcttaggttgcaacatttggcgtaccccttacttagcagcttttttacgaggcgctggtgcttgtggtttcagttcttcttggcgaccaccaattacttcgcctttgaagatccaaacctttacaccgatcacaccgtaagtggtgtgagcttcgtagttggcatagtcgatgtcggcacgcagggtgtgcagtggcacacgaccttcgcgataccattcagtacgtgcgatttcagcaccgccgagacgaccgctcacttggattttgatgcctttggcaccaatgcgcatggcgttctgtacggcgcgcttcatagcgcgacggaacattacgcgacgctccagctgctgagctacgctctgcgcaaccagcataccgtcgagctccggcttgcggatctcttcgatattgatgtgcacaggcacacccatttgcttggtcaggtcctgacgcagtttctcaacatcttcacctttcttcccgataacgatacctggacgagcggtgtggatggtgatacgtgcagtttgggccggacgatggatatcgatacggcttacggacgcgctttttagtttgtcttggagatactcacgcaccttcagatcagcgaacaaatagtccgcataagtccgaccgtctgcgtaccagacggaggtgtgctccttgacgattcccaggcgaatgccaatgggatgtactttctgacccatctcttcgactccgttacttgtcagcaaccttgacagtgatatggcaagaccgcttgacgatgcgatcagcacggcctttggcacgtggcatgatgcgcttcagcgaacgcccttcgttgacgaaaacggtgctgaccttcaggtcatcaacgtctgcgccttcgttatgctcggcgttggctacggccgactccagcactttcttcatgatctcggcggctttcttactgctgaaagccaacaggttgagcgcttcgcccaccttcttcccgcggatctggtcggcgaccaagcgggctttctgggcggagattcgagcgcccgacaacttagcggctacttccatttcctaaccccttaacgcttggctttcttgtctgccacgtgcccacgataagtgcgggtaccggcaaactcgcccagtttgtggccgaccatgtcttcgttaacgagaactgggacgtgttgacgaccgttgtgtactgcgatggtcaaaccgaccatttgtggcaggatcatcgaacgacgcgaccaggttttaactggtttgcgatcgttcttttccgccgccacttcgatcttcttcagtaggtgaagatcaataaaaggaccttttttcagagaacgtggcactgtcgtatccctctatttacttgcgacgacggacgatcattttgtcggtacgcttattaccacgagtcttcgcgcccttagtcgggaagccccatggcgataccggatgacgaccaccagaggtacgaccttcaccaccaccgtgtgggtggtcaaccgggttcatggcaacaccacgaacggttgggcgaacgccacgccagcgtttggcaccagctttacccaacgaacgcaggctgtgctcggagttcgagacttcgcccagggtcgcacggcattcagccagtactttacgcatctcaccagaacgcagacgcagggtcacgtagacaccttcacgagcgatcagctgagccgaagcaccagcggaacgagcgatctgtgcgcctttacctggcttcaattcgatgccgtgtacggtgctaccaactggaatgttacgcagttgcagagcgttgcccggcttgatcggtgccagagcacctgcgatcagctggtcgccagcactcacgcctttaggggcgatgatgtagcgacgctcgccatctgcgtacagcagcagagcgatgtgagcagtacggtttggatcgtattcgatacgctcgacagtggcagcgatgccatctttgtcgttgcgacggaagtcgaccagacgataatgctgcttatggccaccaccgatgtgacgagtggtaatgcgaccattgttgttacgaccaccagacttcgattttttctcgagcagcggtgcgtgaggagcgcctttatgcagctcctggttgaccaccttgaccacaaaacggcggccaggggaagtcggtttgcatttaacgattgccatgatgcaccccttccttactcagcactgctgctgaaatcgagatcttggcctggctgaagggagataactgccttcttccagtcattacgcttgcccagaccgcgagcagtgcgcttgctcttacccagaacattcagggtagtaacacgctctactttcacgctgaacaggctttcgacggccttcttgatttccagcttggttgcgtcagttgcaaccttgaaaacgaactggcctttcttgtcagccagaaccgtagccttttcggaaacgtgcgggccaagcagaactttaaatacgcgttcctggttcatcccagcagctcctcgaatttcttcacggccgacacggtgatcaacaccttgtcgtatgcgatcagactaactggatcggaaccttgcacgtcacgtacatcaacgtgtggcaggttgcgagcagccaggtacaggttctgatcaacagcttcggacacgatcaaaacgtcggtcaggctcatgttgttcagtttgcccagcagatctttggtttttggactttcaacagcgaagtcctgaaccacgaccagacgatcagtacgcacgagttcagcaaggatggagcgcagtgctgcgcggtacatcttcttgttgagcttctgagagtgatcctgtggacgagctgcgaaagtggtaccgccgccacgccagattgggctacggatagtaccggcacgagcacggccagtgcctttctgacgccaagggcgcttaccgccaccacgtacgtcggaacgggtcttttgctgcttgctaccttgacggccgccggccatgtaggccacgactgcttggtgaacgagcgtctcgttgaattcgccgccaaatgtcagttcggaaacttcgatcgcttgagcgtcatttacatttaattgcatgtcagcttccccttaaccgcgagccttggccgctggacgtacaaccaggttgccgccagtagcgccaggaacagcacccttgaccaacaacagattgcgttcagcgtcgacgcgcactacttcgagggactgcacggtcacgcgctcagcgcccatatgaccggacatttttttgcccttgaatacacgaccaggagtctggcactggccaatagagcccgggacgcggtgggaaacggagttaccgtgagtgttgtcttgaccacggaaattccaacgcttgatcgtaccctggaagcctttacctttggactgaccggtcacatcgaccagttgaccagcggcgaagatttcagcgttgatcagatcgccagcctggtagtcgccgtcttcaagacggaactccatgacagtacgaccagctgcaacgtttgctttagcgaagtgacctgcttgagcagcagtcacgcgcgaagcacgacgctcgccgacagtgacttgcactgcacgatagccatcggtctcttcagttttgaactgggtgacgcgattcggttcgatctcaatgaccgtgaccggaatggagacaccttcttcggtgaaaatacgggtcataccgcatttacgaccgactacaccaatagtcatgttgtaaacctcatgagtgtacggggctttcacccgctatggccgcccatttcagagcgttacacgactaagacccaagtcttagccgaggctgatctgtacttccacaccggccgccagatcgagcttcataagtgcatcaacggttttatccgttggctggacgatgtccagtacgcgcttatgagtacggatctcgtactggtcacgcgcgtctttgttgacgtgcggggagaccagaacggtgaaccgctctttacgggtaggcagtggaattggaccacgcacttgagcaccagtacgtttcgcggtttccacgatttcctgggtggattggtcgatcaggcgatggtcaaaagccttcaacctgatacggatttgctgattttgcattggatttcagactccggctgctattcccaccgggcgcaatacgcccgttaaaaggaggcgcaattctatagacgccctagataggtgtcaacccaataaaaaagcccccgctaagcgggggctttctcaaaacatcaaagctcactcaaaagagagattactcgatgattttagctacaacgccagcaccaacggtacggccgccttcacggattgcgaaacgcagaccgtcttccatagcgatggttttgatcagggtgacaaccattttgatgttgtcgcctggcattaccatttctacgccttccggcagttcgcagttaccagtcacgtcagtagtacggaagtagaactgtggacggtagcctttgaagaacggagtgtgacgaccgccttcttctttgctcagcacgtacacttcagcttcgaacttggtgtgcggcttaaccgaacctggcttgaccagaacctggccacgctcaacgtcgtcacgcttggtaccacgaagcagaacgccgcagttctcgccagcacgaccttcgtcgagcagcttacggaacatttcaacaccggtgcaggtggtgacggtagtgtcacgcagaccaacgatttccagtggatcttgaaccttgacgataccgcgctcgatacgaccagttacaacagtaccgcgaccagagatcgagaatacgtcttcgattggcatcaggaacggcttgtcgataacacggactggatctgggatgtagctgtccagagtctcaaccagtttacgaacggacgtggtgcccatttcgttgtcgtctttgccttccagagccatacgagcagaaccgatgatgatcggagtgtcgtcgcctgggaagtcgtaagtgctcagcagatcgcgcacttccatctcaaccagttccagcagctcagcgtcgtctaccaggtcagccttgttcaggtaaaccacgatgtacggaacgcctacctgacgggacagcaggatgtgctcacgggtttgtggcatcggaccatcagcggccgagcaaaccaggattgcgccgtccatctgggcagcaccggtgatcatgttcttcacatagtcagcgtgacctgggcagtcaacgtgagcgtagtgacggatcagcgagttgtattcaacgtgcgcggtgttgatggtgataccacgagctttctcttctggcgcgctgtcgattttatcgaaatcaacgattgcggaaccgaatacttcggagcaaacgcgagtcagagcagcagtcagagtggttttaccgtggtcaacgtgaccgatggtgccaacgttgacgtgcggtagggaacgatcaaatttttctttagccacgacaattaactccttgcctaaaggactgaatcagccttgttttttggatacagtttcagcgatgtgcgccggagctgtgttgtattttttgaattccatagagtagcttgcgcgaccctgagacatggaacgaacgtcggtcgcataaccgaacatctcgcccaacggaacctcggcgcgaatcactttgccggaaaccgtgtcttccatacccaagatcatgccgcgacgacggttaaggtcgcccatgacatcacccatatagtcttcaggtgtaacaacttctaccgccatgattggctcaagcaactcaccaccgcccttctgggccagttgcttggttgccatggaagcagccaccttaaacgccatctcgttggagtcgacgtcgtggtaagaaccgtcaaaaacggttgctttcaggccgatcagcggatagccggcaacaacaccgttcttcatctgctcttcgatacccttctggatagcagggatgtattccttaggaacaacaccgcctactacttcgttcacgaattgcagaccttcctgaccttcgtcagcaggagcaaaacggatccagcagtgaccgaactgaccacgaccgccggactgacgaacgaacttgccttcgatttcacagttcttcgtgatgcgctcacgataggaaacctgaggcttaccgatgttggcttcgacgttgaactcacggcgcatccggtcaaccaggatgtccaggtgcagctcgcccatgccggagatgatcgtttgaccagtctcttcatcagtcttgacgcggaaagatggatcttcctgagcaagcttgcccagagcgatacccattttttcctggtcatccttggtcttaggctctacggcaaccgaaataaccggctccgggaagtccatgcgaaccaggatgattggcttggcagcgtcgcacaaagtctcaccagtggtgacgtccttcatgccgatcagggccgcgatgtcaccagcgcgtacttccttgatctcttcacgggcgtttgcgtgcatttgcaccatacgacccacgcgctctttcttgcctttaaccgagttgatcacgccgtcgccggaggccaacacgcccgagtaaacgcggacgaaggtcaaagtacccacgaatgggtcggtagcgatcttgaacgccagagccgagaacggctcgttgtcatcggcgtgacgctccatttcttcttcctcgttatcagggttggaacccttgatagcaggaatgtcggttggagcaggcaggtagtcgataacggcgtcgagaaccaggggaacacccttgttcttgaacgaggaaccgcaaacagccaagacgatctcaccagcgatagtacgctgacgcagagcggccttgatttccacgttggtgagttcttcaccttcgaggtacttgttcatcagctcttcgctggcttcggcggcagcctcaaccatgttgttgcgccactcgtcagccagttcctgaagctcttcagggataggcttacgaacaggaaccatacctttgtcggaatcattccagtaaacagcttccatgttgatcagatcgatctgaccctggaagttgtcttcggaaccgatagccaactggataggcaccggagtgtgacccagacgctgcttgatctgaccgatcacgcgcaggaagttggcaccagcacggtccatcttgtttacataaacaagacgtggaacgccgtacttgttggcttgacgccatacggtttccgactgaggctcaacgcccgaggtaccgcagaacacaacgacagcgccatcgagtacgcgcagggaacgttcaacttcaatggtgaagtctacgtggcccggggtatcgattacgttgaagcgatgctcgtctttgtactgcttctcggaacctttccagaaggcggtaatagcagcagaagtaatggtaataccacgctcctgctcctgaaccatccagtctgtggtcgcggcgccgtcatgcacctcgcccattttgtgacttttgccggtgtaaaacagtacgcgctcggtggtggtggttttaccagcatccacgtgagcgacgataccgatgttacggtagcggctaatcggagtagtacgagccataaagccctcgcaaaattagtgaagctaaaattagaagcggtagtgcgagaaagctttgttggcttcagccatacggtgcacgtcttcacgcttcttaacagcagcacctttaccttcagcagcgtccaacagttcgccggccaaacgcagagccatagacttctcgccacgcttacgggcgaagtctaccaaccagcgcattgccagagcgttacgacgggacgggcgaacttcaaccggaacctggtaagtagcaccgcctacacggcgcgacttcacttcgaccagcggagcgatggcgtcgagagctttctcgaagatttccagggggtcgctgttcttgcgttctttaaccttttccagcgcgccataaacgatacgctcggcaacggctttcttgccgctttccatcacgtggttcatgaacttggccaggatttggcttccgtattttggatcgtcaagcacttcgcgcttggctgctacgcgtcttcttggcatggataagccctcaaacggtcttcaggttcgctcggaatcggtgccctttcgggacgcctccgaccttactcttatcgactcagaaaataagatgattcaggtttacaaaaagccgctactacttaggcttcttggtaccgtacttcgaacgaccctggttacgacctttaacgccggaagtatccaaagaaccgcgtacggtgtgataacgaacacctggcaagtcttttacacgaccgccgcggatcagtaccacgctgtgctcttgcaggttgtggccttcaccgccgatgtacgaggaaacctcgaaaccgttggtcagacgcacacggcatactttacgcagtgccgagttaggttttttcggcgtggtggtatacacacgggtgcatacgccacgacgttgcgggcagttctgcagcgcaggtacgtcggatttctcgacgatacgcttacgcggctgacgtaccagctggttgatagttgccatctactagctccactgttgtcttgcgacgctattgtcttgcaagaaaagcaaaatggcaggaacgaattcccgccaaatttaggggtacaagagtctaaagaggatcttgtccccagtcaaggcaaggccccgacctcccctcgcgtcgaaccggggcaaaaatgcctcgatccgacgaatgggagtgtcagggcccagactcatctatcgcagaactcagttaccgcttgagttcagcgcttcggtcagtgcagcttccacttcactggcgcttacgcgcaacggcttgtcagcatcacggcgacgcttacgctcgctgtggtaagccaaaccggtacctgccgggatcagacgacccacgactacgttttctttcaggccgcgcaggtaatcgcgcttgccggttaccgctgcttcggtcagtacgcgagtggtctcctggaaggaggccgccgagatgaacgactcagtggacaacgacgccttggtgatacccagcagcacgcgagtgaacttggagacaaatttctcttcgttcgccaggcgctcgttttctaccagtacgtgagtcagttccatctggtcgcccttgatgaaactggaatcgccggattcagcgatttcaactttacgcagcatctgacgcaggatggtctcgatgtgcttgtcgttgatcttcacgccttgcagacggtaaacgtcctggatctcgttaacgatgtacttggccagcgcacttacacccagcagacgcaggatgtcgtgtggatcgctagggccgtcggagataacttcgccgcggtttacctgttcgccttcgaacacgttcaggtgacgccacttcggaatcagctcttcgtacggatcgctaccgtcgttcggagtaatgaccagacggcgcttgcccttggtctctttaccgaacgcgatggtaccgctgacttcagccagaatcgacgcttctttcggacgacgagcttcaaacaagtcggcaacacgcggcagaccaccggtgatgtcacgggtcttcgaagtttcttgcgggatacgcgcgataacatcaccgatcgcgatcttcgcaccatccgctacaccgaccagggcgttggctggcaggaagtactgagcgattacgtcagtgcctggcagcaacagatccttgccgttgtcatcgaccatcttcacggcaggacggatgtccttaccggcagctggacgatctttggcgtcgagtacttcaatgttggtcataccggtcaattcgtcagtctgacgcttgatcgtgatgccttcttccatgcccacgtaggtcacggtacctttcatttcggtaacgatcgggtgagtgtgcggatcccacttggccacgattgcgccagcgtcgaccttgtcaccttctttaaccgaaatcacagcaccgtacggcagcttgtaacgctcgcgctcacgaccgtagtcatcagcgatggccagctcaccggaacgggacacagcaaccaggtggccatccactcgctcaacgtgcttgaggttgtgcaggcggacggtaccgccattcttaacctgaacactgtcggctgcggaggtccggcttgccgcaccaccgatgtggaacgtacgcatggtcagctgggtacccggctcaccgatggactgggcagcgataacgccgaccgcttcaccgatgttcacctggtgaccacgagccaagtcacggccgtagcacttggcgcagatgccgtagcgggtttcgcagctgatcggcgagcgaacgatcacttcgtcgatgctgttgagttcgatgaactcgacccacttctcgtcaaccagggtgccggcaggaacgataacttcctcggtacctggcttgaacacgtcacgggcaatcacacgacccaatacgcgctcacccagtggctctacaacgtcaccgccttcaatgtgcggagtcatcagcaggccgtgctcggtgccgcaatcgatctcggttacaaccagatcttgtgcaacgtctaccagacgacgagtcaggtaaccggagttagcggttttcaacgcggtatccgcaagacccttacgagcaccgtgagtggagatgaagtactggagtacgctcaaaccttcacggaagttcgcagtaatcggcgtttcgatgatggagccgtccggcttggccatcaggccacgcataccggcgagctgacggatctgcgcagcagaaccccgtgcgcccgagtcggccatcatgtacatcgagttgaaggattcctggtcaacttcgtcgccgtgacggtcgatgactttctctttcgagaggtttgccatcatcgccttggaaacttcgtcgttcgccttggaccaaaggtcgatcaccttgttgtacttctcgccctgggttaccaggccggaggcgtactggctctcgatctctttcacttcgtcagtggcagcactgatgatgcgagctttttcatccgggataacgaagtcgttaacgccgatggaaacgccggagatagtcgagtaagcgaaacctgtgtacatcaactggtcagcgaagataacggtctctttcaaaccaaccacgcggtagcactggttgatcagcttggagatcgcctttttcttcatcggcaggttgacgacgtcgtaagacagaccttttggcacaacctggtacaacagcgcacggccgacagtggtgtcgacgatacgggtgttgctcacgctgccgccgtcacggtcgttgacggtttcgtggatccgcaccttgaccttggcgtgcagtgcggcttcgccggcacggaacacacggtcaacttcttgcaggtcagcgaacacacgaccttcgcccttggcgttgatcgcttcacgggtcatgtagtacagacccaatacaacgtcctgcgacggaacgatgattggctcaccgttggctggcgacaggatgttgttggtcgacatcatcaacgcacgcgcttccaactgggcttccagtgtcagcggtacgtgcacggccatttggtcgccgtcgaagtcggcgttgtacgcagcacagaccagagggtgcagctggatagccttaccttcgatcagtacaggttcaaacgcctggatacccagacggtgaagggtcggtgcacggttgaggagaaccgggtgttcgcgaatcacttcagcgagaacgtcccaaacctctggcagttcgcgctcgaccattttcttggccgctttgatggtggtcgcgagaccgcgcatttccagcttgccgaagatgaacggcttgaacagctcgagtgccatcttcttaggcagaccgcactggtgcagacgcagggtcgggcctacggtaattaccgaacgaccggagtagtcaacacgcttaccgagcaagttctgacggaaacgaccttgcttacccttgatcatgtcagccagggatttcagaggacgcttgttggaaccggtgatagcgcggccacgacgaccgttgtcgagcagggcatcgaccgcttcttgcaacatacgcttttcgttgcgcacgatgatgtccggagcggacagatcaagcaggcgcttcaagcggttgttacggttgatcacgcggcggtacaggtcgttgaggtcggacgtcgcgaaacgaccaccgtccaacggtaccagcggacgcaggtctggcggcagaaccggcagaacggtcagcaccatccactctggcaagttgccggaaccctggaaggcttccatcaacttcagacgcttggacagcttcttgatcttggtttcggagttggtttgcggaatctcttcgcgcagacgaccaatctcgtgctccaggtcgatagcgtgcagcagttcgcggacagcttcggcacccatgcgggcatcgaaatcgtcgccgaactcttccagcgcttcgaagtactgctcgtcgttcagcagctgacctttttcaagggtggtcatgcctgggtcgataacgacatagctctcgaagtagagaacacgttcgatatcacgcagggtcatgtccatcagcaagccgatacgggacggcagcgatttcaggaaccagatgtgggcaaccggcgaagccagttcgatgtgcgccatgcgctcacgacgaaccttggccagtgcgacttcaacgccacacttctcgcagatcacaccacggtgcttcaagcgcttgtacttaccgcacaggcactcgtaatcctttaccgggccaaagatcttggcgcagaacaggccgtcacgctcaggtttgaacgtacggtagttgatggtttccggctttttaacttcaccgaacgaccacgaacggatcatctcaggcgatgccaatccaatacggatggcgtcgaactcttcgacttgaccctggtttttcagcaaattcagtaggtctttcaaggcctttcctcctggcggagcagagagcgggctaagcagccccgctctcgattcgcgtcacgtgttattcggtttccagatcgatatcgatgccgagggaacgaatttctttgatcaacacgttgaaggactcgggcatgcccggctccatacggtgatcgccgtccacgatgtttttgtacatcttggtacgaccgttcacatcgtccgacttcactgtgagcatttcttgcagagtgtatgcagcaccgtatgcttccagtgcccagacctccatctccccgaaacgctgaccaccgaactgagccttaccacccagcggctgctgggtaaccaggctgtacgaaccggtagaacgagcgtgcatcttgtcgtctaccaagtggttcagcttcagcatgtacatgtagccaacagtaaccgggcgctcgaacttgttgccggtacggccgtcgaacagctgcatctggccgctttctggcaggtctgccagtttcagcatggccttgatttcgctttccttggcaccgtcgaacaccggggtagccattggaacgccgccgcgcaggttcttcgccagatccaggatttcctggtcggagaaggtgtccagctcttcgttgcgaccgccgatctcgttgtagatctcgtgcaggaacttacgcaggtctgcgaccttgcgctgctcttcgatcatacggttgatcttctcgcccagacctttggccgcgaggcccaggtgggtttcaaggatctggccaacgttcatacgcgaaggtacgcccaacgggttgaggacgacgtcgaccggggtgccattggcatcgtgcggcatgtcttcaaccggcatgatcacggagaccacacccttgttaccgtgacgaccggccatcttgtcgcccggctggatgcggcgacggattgccaggtaaaccttgacgattttcagcacacctggagccaggtcatcgccctgctgcagtttgcgcttcttgtcttcgaacttgtcgtccagcagacggcggcgatcaacgatataggcctgggccttctcgagctgctcgttcagagcatcttcagccatgcgcagtttgaaccactggccgtgctcaagaccgtcgaggatttcgtcggtgatgtcctgacctttcttcaggcctgcgccgccttcagccttgtggcctaccaaagcggaacgcagacgttcgaaggtcgcgccttcaacgatacggaactcttcgttcagatccttgcggatctcgtcgagctgggtcttctcgatggacagtgcacgagcatcacgctcaacgccgtcacgggtgaagacctgtacgtcgatgacagtacccttggtaccggtaggtacacgcagggaggtgtctttaacgtcgctggctttttcaccgaagatggcacgtagcagcttctcttccggcgtcagttgggtctcgcctttcggagtgaccttaccgaccaggatgtcgccagcgccaacttcagcacctacataaacgataccggcttcgtccagcttgttcagtgcagcttcacccacgttcgggatgtctgcagtgatttcctcaggcccaagcttggtatcacgtgccacacaggtcagttcctgaatgtggatcgtggtgaagcggtcttcttgaaccacacgctcggacaggcagatggagtcttcgaagttgaagccgttccatgccatgaacgcgatgcgcatgttctgacccagagccagttcacccatgtcggtggacgggccgtcggccatgatgtcgctacgctgaacgcgatcacccttgctcaccagcggacgctggttgatgcaggtgttctggttcgagcgggtgtatttggtcaggttgtagatgtcgacaccggcttcgccagtttctacttcgtcatcggcaacacgaaccacgatacggctggcatcaacggagtcgatcacaccgccacgacgagccacgacgcaaacgccggagtcacgcgccacgttgcgctccatgccggtacctaccagcggcttgtcagcacgcagggtcggtacagcttgacgctgcatgttggaacccatcaacgcacggttggcgtcatcgtgctccaggaacgggatcagcgacgctgcaacagaaactacctgcttgggcgatacgtccatcaaggtaacgtcttccggcgccttgacggtgaactcgttcaagtgacgaacagctaccagctcgtcgaccaggactttcttgtcgttcatcgtggccgaagcctgagcgatcacgtgatcagcttcttcgatggcggacaggaatacgatctcgtcggtaaccagggcgtctttcaccacacggtacgggctttcgaggaacccgtactggttggtgcgcgcataggcagccagggagttgatcagaccgatgttcggaccttccggcgtttcgatcgggcaaacacgaccgtagtgcgtcgggtgtacgtcacgaacttcaaagccagcacgctcacgggtcagaccgcccgggcccagtgcagaaacacggcgcttgtgggtgatctcggagagcgggttgttctggtccatgaactgcgaaagctggctggaaccgaagaactctttcaccgccgcagccactggcttggcgttgatcaagtcttgcggcatcaggccttcgctttcagccatcgacagacgctctttgaccgcacgctcaacacgtaccaggccaacgcggaactggttctcggccatttcgcctacgcagcgaacacggcggttacccaggtggtcgatgtcatcgacgatgcctttgccgttacggatgtcgaccagggtcttcaataccgcgacgatgtcttccttgcacagcacgcccgaaccttcgatctcggtacgaccgatacgacggttgaacttcatccggccgaccgcagacaggtcatagcgctcagggctgaagaacaggttgttgaacagagtttcggcagcgtctttggttggtggctcaccaggacgcatcatgcgatagatctcgaccagcgcttccaattggttgctggtggagtcgatcttcagtgtgtcggagatgaacggaccgcagtcgatatcgttggtgtacagggtctcgatgcgaacaacctgggccttggcaatcttggccaggatctcggtgttcagctcggtgttgcactcagccaggatttcgcctgtagccgggtgaacgataaccttggcggtagtgcgacccaggacgtagtccagtggcacttccagctctttgataccggctttttcgatctggttgatgtggcgcgcagtgatacgacggccagcctcaacgatgaccttgcctttttcgtcctggatgtccaggacagcaatttcaccacgcagacgcgaagcgatcagttccagcttgagggtttcatccttcaggctgaatacgttggtggtatagaaagcatccagcacttgctcagtggtgtaaccgagcgcgcgcagcaataccgaggccggcagcttgcgacgacggtcgatacgcacgaacacgcagtctttcgggtcgaactcgaagtccaaccacgaaccgcggtacggaatgatccgcgcggagtacaggagtttgccggagctgtgcgtcttgccgcggtcgtggtcgaagaacacgcccggggaacggtgcagctgggaaacgattacacgctcggtaccgttgattacgaaggtaccgttttcagtcatcagtgggatttcgcccatgtagacttcttgctctttgatgtccttgatcgctttgttcgacgattctttgtcgaaaatgatcagacggacttttacccgcaaaggtacggcgtacgtaacgccacgcaacacgcattctttgacatcaaatgccggttcgcccaggcgataaccgacgtactccagcgcagcattgccggagtagctgatgatcgggaaaacggatttgaaggccgcatgcaggcccacgtcgcggaactgatctttggtcgctcccgcctgcaagaattcacgatacgaatccagctggatagccagaaggtacgggacatccatgacgtccggcaacttgctaaagtccttgcggatacgttttttctcagtatatgagtaagccatcagcgttccccagcttggtcacctgcttgtttggcccctccgacgggagcagccagaaaatcttgcaaaccccatggtttgcaccaccgcttcgggtggctacagcgcgttaatggcggcgaccgagtcgacagccaagaacggaaaaaggccggtggcaagagccaccagccatcagccttcagcttaacgcttgggctggagacgcaaggtcgatgcttacttcagctcgactttagcgcctgcttcttccagagtagctttggctttgtcagcggcgtctttcgacacagcttccagaacctgggcaggagcgccgtcaactacagccttggcttctttcaggcccagaccggtcagttcacgtactgccttgatcacgtttactttcttctcgccagcttccagcagcatgacgttgaattcggtttgctcttcagcagcgacagcagcaacagctgggccagcggaagcagcggcagcggaaacgccgaatttttcttcgaaagctttgatcagctcaacaacctgcagaaccgacatttcagctacggcgttgaggatatcgtcttgggagatagacattgctgtatttcctgaattgggggacggcctacgcggccatcgaaataaacaaaaatacgcgagagaatttgctcagccttaggctgcggcagcttctttttgctcgcgaactgcagccagagtacgagccagcttgctggtagcgccttgaatcacgctcatcagctgcgaaatagcttcgttacgggtcggcagtgttgccagtacgtcgatttggttagctgcgaggaacttgccctcgaacgcagctgccttgatctcgaacttatcctgactcttggcgaattctttgaacaaacgggcagcagcgcctggatgatctttagagaacgcgatcagagtcgggccggtgaacacgtcgttgagaacactgtattcagtgtcagcaacggcgcgcttgagcagggtgttacgtacaacacgtacgtatacgccagcttcacgagcctctttacggagtccggtcatagcgcctactgtcacaccacgggcatcagccacgacagcggacagagcagctttggcagcctcgttgacttcagcgacgatggccttcttgtcttcgagattaattgccacgggtttaactcctgcttgttaccgtttcatctggcctaggcctgatgtcgttttggtgtctgattcggtaaggaaccgggagcaccatctgcgtaggcttgttggtttaagacttgcgtcgcctacggtcttggatagcccccgccaggcagggaccccaatctttcaattggcgcaattacttgcgccaatttatgtcttatacgtccagcgagccttggtcgatgaccagacctgggcccatagtggtgctcagggtaacgcgcttgacgtagatacctttcgaggaagcaggcttgatacgcttcagatcagcgatcagggcttcaacgttttccttcagcttgacggcatcgaagccgactttgccaacggaggtgtgaatgatgccgtttttgtcggtgcgataacgaacctgaccagccttggcgtttttaaccgcggtagctacgtctggcgttacggtgccgactttagggttaggcatcagaccacgtggaccgaggatctgacccaactgacctacaacgcgcattgcatccggggaagcaattacgacgtcatagttcaggtcgccgcctttcatttcggcagccaggtcgtccatgccaacgcgatcagcaccagcggccagagcagcttcagcagctgggccttgggtgaagacagcaacacgtacagtcttgccagtgccgtgtggcagcacagtagcgctacgaacgacctggtcggatttacgtgggtcaacacccaggtttacagcaacgtcaacagactcgctgaacttgacagtcgacagctcggtcagcagggcagcagcgtctacgaagttgtaggacttgcctgcttcgattttgccggcgatagccttttggcgcttggtcagcttagccattacacaccctccacgttaaggcccatgctacgagcagaaccggcgatggtacgcacggctgcatccatatcagctgcagtcagatccgcgtttttggttttcgcgatttcttccagctgagcacgggttacagtgccaaccttaacagtgttaggacgagcggaaccgctagtcagaccggcagctttcttcagcaaaaccgaagccggggtcgacttggtttcgaaggtgaagctacggtcgctgtatacagtgatgatcactggagtcggcagacctggctcaagaccctgagtacgggcgttgaaggccttgcagaattccatgatgttcacgccgtgctgacccagagctggaccgacgggtgggctagggttggcctgagcggccttcacttgcagcttgatgtaagcggtaatcttcttggccatgaggcactccaattacgggttcaaacgcctcgaaaggctccccggttacttgcgcgtttatcccagtgacgacaaaaccccacagccgaggctgcggggttgggatgcttgcccagctagaccttctcgacctgactgaactccaactctaccggagtagagcgaccgaaaatgagcaccgccacttggatccggctcttttcgtagttaacttcttcgaccgtaccgttgaaatcagcgaacggaccgtctgtaacgcgaacaacctcacccggctcgaacaacgtcttcggcttgggcttgtcgctaccgtcagcaacacgacgcagaattgcttccgcctctttgtcggtgatcggagcaggcttatcggcagtaccgccaatgaagcccatgacgcgaggggtatccttgaccaagtgccaagtaccttcgttcatgtccatctgtaccagcacgtagccagggaagaacttgcgttcgcttttgcgcttctgcccattccgcatttcaaccacttcttcagtgggaaccagaatttcgccgaagccatcttccatgcctgccagctttacgcgctccagcaaagagcgcataacatgcttctcgtaacccgagtaagcatgcacaacgtaccaacgcttagccacgggacacccttagccaacaatcaaggaaacaagccagccgagcagggaatcaagcccccacaacagcaacgccataaccagaacaacagccacgacaatcaatgtggtctgcgtggtttcttggcgagtcggccaaacgactttacggatttcggtgcgtgcttccttaaccagtaccgcgaaggacttgcctttggcagtctgcaggcctacaaaggcagctacagcagcaagggcaagcaaagcgagtacacggtacaggatcggcgaagcagaatagtactgattgccaacaacgcctacgaccaccaaggcgactacagcgagccactttaccagatcgaaacgagagctttgagcttcagccttaggagtcatctatgaagatcctgtgaaaagaaagccagacacaccacgtgaatctggcaggtcaggagggaatcgaacccccaacctacggttttggagaccgtcgctctgccaattgagctactgacctaaaacaaaatcaggccgaccattatgcaggcctgaaaaagactttacaacaaccaaccccacaagacctgaaacatcgaacaacattcaagccgaggcagctgttaaaacaaaggcagatattttcatatctgccttgttatatggagctcttgagcggatttgaaccgctgacctcacccttaccaagggtgtgctctaccaactgagctacaagagcgaaacaccttgcacaacctgcaaacttggagcgggtagcgggaatcgaacccgcatcatcagcttggaaggctgaggttctaccactaaactatacccgcggagcttgcagctcacgctaaaaatggtggagggggaaggattcgaaccttcgaagtcgtagacgtcagatttacagtctgatccctttggccgctcgggaacccctcctaagcgagccggcattttacatcacgccgaccttctgtcaagcattttctcatttaaattatgaggttagctgcattgacggtagctttgcactgtagcccttaaaggtcttcactgcgaagcgggcgccattctatgcaaactattcgagagttgcaatgccttcgcacagcattattttatgttttaactcattgaattcattagcaaggctttcaaagggcagatcgtcagccaggcgacggctctcaggggctacgcgcaaccaataacccgaggcgtccggtgcgttcagcaactggaccttgaccttgatatccaggctcgtaagcctctgctcgagagaggaggcttggcgtcgatccgagaaaccaccgatgtataagcaggtattttgcgcctcggccggcctcgcccgatcgcgccgagccacagtgtctgccgactcactcaagaggcgaatgtcttgctgcgttccccgatggagactcaagggcgtgacatccttggcccgcaatggcgcctcttgctgatgccagacgtaataaaaaacattgagaaccagtaaaagtaaaaacagccagcgcataatcacctcaagacaaaggacacgccatcgccaaaccaacaaacaccaggtccgggaccaaccgagcctgaggcgcagcatccctgaccaggtcggcatcgcctccagtgaggaagaccgtgaaatcctccccccaatagcctcgcgccaactcgagctgggtcagcacgaaccctctaagcatgagcgtacaaccacgctcgacagcctctacggttgttcgaccaggagagagacgctccagcgcccgctcagcggccgcgtcgtcatagcgtatcttgcgggtatgggttcgcagttgattacgcataagcggcatacccgggcaaataaacccacccaggtggccaccgtccggaccaataaaatctgctgtcgccgctgtaccaaagtcgagtaccaagcatgcacctgacgccaacttgaacgcgcctagcattgccagccatcgatccatccccaggcgctggaagtcgtcgtagccattgcgcactccgcccatttcttgagcagaggcggcgcaggaaacagcaacgccaaatgccgctaccaaggcagctatcagcttatcggtctcctcaagcgcgcgaacactcaccaaccgacaacgcgtgagcaatagaccaggcaaagccaccaaactctcgatcagcgcgatatccgaacctgcgatgccttccgcgcgaacagttgcctcactcaactcaagaacacgccatttgataaagctatttccacagtcgagctcaagaatcatcacgcaacctcaggcttaactcaccaccgctgtatattttctcaacgccaccgacatccaaacgcaaggcgccctgacgatccacacccagcacaaccccatcaatctgattgacgcccgcgataagcgacacggacttcccctgccaggcgtgatgctgctcccattcgtcttgcaaccctgcaaaacccgcagccttgtgttgatctaggtaggcttgtagttgcaaacccagacgcgccaccaggtgattacgatccacaggagagccagcctcgagctgcatcgaagtccattgctgatcaacctctacagccttctgcatattcacattgatacctatacctagcacaacgtgacagatatctgcgggatctcccaccaactccagcaagatgcctgagattttcttttgcccaaccaggacgtcgtttggccacttcaaagctgcgccccgcacacccgactcacgcagagcctgcaggactgccagccccaccaccagactcagcccttccagttgccgcagaccgccctcaatacgcaatacaaggctgtagtaaacgttttgcgcaaatgggctgacccatttgcggcctcgtcgccccctaccagccgtctgctgctccgccagcacaacaaaaggagccgcactgcccgcaccgataagacgtaaagcctcagcattagtggaatcaatggagtcgaaaatgtgaacgggccaagccaaggaagccgcgcccagagaaatctcctgcgcattcaaaaacaccaatggcgcagccaatctatatccgcggccccgcaccttatgaatggggagattcaattctgcctcaagatgctgaagctgcttccacacggcactgcgactaacgcccaaggcagcgccaagcgcttctccagaatggaactgaccatctttcagaagtttcaacaacgtcagcatgcacatatcgcctcagaatgaggcacgcatgatagccatgcgcagggtcattgcatagaaaggctggatatcagtctggatcgagattttcgagcgcccaaaacaaaaccccaactgctttcgcaattggggtttcggaatnnnnnnnnnnnnnnnnnnnnnnnnnnnnnnnnnnnnnnnncaacttcaaccacttgcgctttcgatctctcgtaagcgggaggcgaattctacagcgttacacgctgctgtcaacacctctttttcaacttccttttggcttcgatgaactgaagcaacttgctgtcgaaaactgcataactcattgtttaccaaggagttttccgtttcgactgcgccggaagtggggcgaattatagacagatataattcgccgtcaacacctatttcagacttattcggatttgagcgtaatacgcgcaaatgccttcttacccgcctggcaaacgtgagtggcgcccagctcatatataaaggtgcgatcaaccacctcaccatctatacgcacaccgcccgaacccaagagatcacgcgctaccgccgaattcttcaccaggccagccttattaagcacagccgcaatcggcatagcctcggcagcagtcagctcaatctccggcagatcatcgggcagctcgccatctttcatgcgattacctgccgcacggtgagcgctggccgcagcctcctcaccatggaagcgcgcaacgatttcttcagccagcttaatcttcacatcccgaggattagcgcccgcctcgacatccgcacgcagcgcattgatttcgtccatcgagcggaagctcaacaactcgaagtagcgccacatcagtgcatccggaatagacaccagcttgccgtacatcacacccggtgcttcctggataccgacatagttacccaaggacttggacatcttcttgacgccatccaagccttccaacaatggcatggtcagaatgcactgagcctcctgaccataggcgcgctgcaattcacgccccatcaacaggttgaacttctgatcggtgccgcccaactcaacgtccgcacgcagcgccaccgagtcgtacccctgaaccagcggataaaggaactcatggatggcgattggctgattggtcgagtagcgcttgtcgaagtcgtcgcgctcaagcatgcgcgccacggtgtactgggaagtcaggcgaatgaaatctgccggccccattttgtccatccaggtggagttgaacgccacctcggtcttggctggatcaaggatcttgaatacctgggtcttataggtctcggcattatcgagcacctgttcgcgagtcagcggcgggcgcgtagcgctcttgccgcttggatcaccgatcatcccagtgaagtcacctataaggaagatgacctgatggcccagctcctggaactgacgcagcttattaataagcacggtatgacccaggtgcagatccggcgcagtcggatcaaagccagccttgatacgcaggggttggccacgcttgagtttttcgatcagctcggactcgaccaacagttcttccgcaccacgttttatcagcgctagctgctcttcaaccgacttcataacagacccgcaaggctcagattcaaaagggaaccaaccatacaagatcagggactaattacaagttttgccctgcgcacggacaccgttcagcaagcccagcgttcgcgagcttgcgccacagatgatttggttatattttatacagttatttcatcttcatcatgtcattcatcttttccatttcatcttcaaagtcaaaattacttatgaccactgaaccgtctaaagcgccgccgctttacccgaagacccacctgctcgccgcaagtggtatcgccgcccttctcagcctggcactgctggtattcccttccagtgacgttgaagccaaacgaacatccctgagccttgatctggaaagcccagttgaacaactgacacaagatcaagacgcttccgacgctcaacaagccacaaacactgcaactgaatcacctttcgcccagatcgaaagcacacccgaagacacccagcaagccgcccaggaagcacctgcagcagccaagagtccccagcatcgcgaagtcatcgtgggcaaaggcgacacactctcgaccctgttcgaaaaagttgggttgcctgccgccgctgtaaatgacgtgctcgccagcgataagcaagccaagcaattcactcagctcaaacgtggtcaaaagcttgaatttgagctgacgccagacggccagttgaacaacctgcacaccagcatcagtgacttggaaagcatcagcctgagcaaaggcgccaaaggcttcgcattcaacagaatcaccaccaaacccgtcatgcgttccgcctacgtacatggcgtgatcaacagctccctgtcgcagtcggccgcgcgtgcgggcctgtcgcatagcatgaccatggacatggccagcgtatttggctacgacatcgacttcgcccaggacatccgtcaaggcgacgaattcgacgtgatctacgaacagaaagtagccaacggaaaagtggtcggcactggcaacattctttctgcacgcttcacaaaccgtggcaaaacctacaccgccgtgcgctacaccaacaaacaaggcaacagcagctactacacggctgatggcaacagcatgcgtaaggccttcatccgtacacccgttgactttgcccgtattagctcgcgtttctccatgggccgcaagcatccaattctgaacaaaattcgcgcacacaagggcgtcgactatgccgcgccgcgtggcacgccaatcaaagcggcgggcgacggcaaggtcttgttggcggggcgccgtggtggttacggcaatacggtgatcatccagcacggcaacacttaccgcacgctgtacggccacatgcaagggttcgccaagggcgtcaagacaggcggcaacgtgaaacagggccaagtgatcggctacatcggtaccaccggcctctccaccggcccgcacttgcactacgagttccaggtcaacggcgtacacgtcgacccattgggccagaagctgccgatggccgacccgattgccaaggccgaacgcgcgcgcttcatgcaacagagccagccgctgatggcacggatggatcaagagcgctccaccttgctggcttcggcgaagcgttaaggtatgccgctctatatcggcgtgatgtccgggaccagcctcgacggcctggatatcgccctaatcgaacaaggcgcggcgatcaatctgatcgccacccgctatatcccaatgcctgacgccttgcgcacagaactgctgagcctatgcgccagtggcccggatgaaatcgcccgctcggcaattgcccagcagcagtgggtaacgcttgcggctcaaggcatccacgccttgctggatcaacagaacctcaagcctcaggacattcgggcgattggcagccatggccagacgattcgccatgaacccgcccgaggttttactgttcaagtcggcaaccctgccctcctcaccgaactcacaggcatcaccgtcgtcagcgatttccgcagccgcgatgtcgctgccggcggccaaggcgctcctttggttcctgcctttcatgaagccttgttcggcgagcagaggggcaatcgcgcggtattgaatatcggcgggttcagcaacctcagcctgatcgagacgggcaagcctgtcgccggtttcgactgcggcccagggaacgtgctgctcgatgcctggattcacctgcagcgcggcgaacactttgatcgggacgggcaatgggcggccagcggaaaggtacagccccagttgctcaccacgttgctcagcgatccgtttttcttgaccaagggcccgaaaagcacgggccgagaggtgttcaacctggcctggctgcagcagcaccttggccgcttgcccgcctttgaaccccaagacgtgcaggccaccctgctggagctgacggccctgaccatcgtcgagtccctgcaaagcgcccagactgacacaacaaccttgctgatctgtggcggcggcgcccataacggggcactgatgagccggctgaccgcgctgctgccttccacccatgtcagcactacagcggcctacggcgtagatcctgactgggtagaggcaatggccttcgcctggctggcccattgctgccttgaaggcattgccgccaatcgccccagcgtcactggcgcacgtgggcttcgagtgcttggcgcgatctaccccgcctgacccccagacagcaaaacgccgcttggcccgtaaaagccaagcggcgtttttgtatctgctatcgatcagatcgagaacgaagacccgcaaccacacgtcgtggtggcattagggttcttgatcacgaaacgcgagccttccagaccttcctgataatccacctcggcacccgccaggtattggaagctcatcggatccacgaccaggctcacaccctcgcgctcaacgatagtgtcgtcatcggccacatcttcatcgaaggtaaaaccgtactgaaaccctgaacaaccgccgcccgtaacgaatacgcgcagcttcaagcgatcattaccctcttcatcgaccaggctcttcaccttgtgcgcagcaccgtgggtgaattgcaaagccgtgggggtgaaggattcaacgctcatgctgataatctcccggcgtagcgccgccatatgcgtaatggccggtattatccgcttctcctagaaaagcggtcaactattgttacggtatatcaatctgcccagcgaccattaaaaatgcaaaaggcccgatcaacgggcctttcgcgcaacggtaagcccgcgttaaggcaacatccccgcgtgggacaggcccaacttctcgtccaggccgaacaggatgttcatgttctgcaccgcctggcccgacgcgcccttgaccaagttgtcgatcaccgacaacaccaccaccaggtcgccatcctgcggacgatgcaccgcaatacggcacacattggcaccacgcacgctgcgcgtttccggatggctgccggccggcatcacttcgacgaacggctcattggcataacgtttttcaaacagcgcctgcaggtctaccgagcgatcggtgacggtcgcatacagcgtggagtggatcccacggatcatcggcgtcaggtgcggcacgaaggtcagccccacatcctggccggcagcgcgacgcaagccctggcggatttccggcaagtgccgatgaccttttaccgcataggctttcatgctttccgacgtttcggagtacagagaacctaccgccgcaccacggccagcaccactgacgcccgacttgcagtcggcgatcaggcgcgacacatccgccaagcccgcttccagcaatggcaggaaacccaattgcgtggctgtcggatagcaacccggcaccgcaatcaggcgtgcttgcttgatttgctcgcggttgacctccggcaagccgtaaaccgcctcttccaacagttgcggcgcaccatggggctggccgtaccatttggcccactcatcggcgtcttgcagacggaagtctgccgacaagtcgataaccttcgtaccggccgccagcaactcaccggccagagcatgggcgacaccgtgaggcgtggcgaagaacaccacgtcgcaggcacccagggtcttggtgtccggcacactgaacgccaggccgtcatagtggcctcgcaagttggggtacatatcggccacggccagcccggcttcggatcgggaagtgataaccaccacctcagcttgcggatgctgagccaacagacgcagcaattcgacaccggtgtaacccgtgccgccgacgataccgaccttgaccataaacctgccctcaacgaacccactggaaagccgtcgataataggggccgtatcgtcctgcgacaaccgtcaacgtgacgtacgggcgcatgagccactactatcttcgctaccgtgaacctgggaataactaaaatgctctatctatgggtcaaagccttccacatcgtcagcatcgtttgctggtttgccgggctgttctacctgccgcgcctgttcgtctaccacgcccaaagcgaagacaccgtcagcaaggaacgtttcagcatcatggagcgcaagttgtaccggggcatcatgggcccggcgatggttgccacactggtcttcggcatctggatgctggccctcaaccccggcattttccagtcgggcgcctggatccacgccaagctgaccctggtcgtcctgctgattggctaccatcacatgtgcggcgcacaggtaaagcgcttcgcccgtggcgaaaacacccgcagccatgtcttttatcgctggttcaatgaagtcccggttctgatattgctggctatcgtaattttggtcgtggtcaaaccgttctaacttcaattactcggggaacctccaatgtcgctgcccgctctgctggaacaacgtctgcgcctgcccgtggtggccgcgccgatgtttctgatctccaatccgcaactggtcctggcctgctgccgcaacggggtagttggcagtttcccggcgctcaaccaacgcgaaagcagtagcttcaaggcctggctggaagaaatcgaagcgggcttgacgcagttggacaaccctgcgccctatgccgtgaacctgatcgtgcataacagcaatccacggctggaggccgacctggcgatttgcgtcgagcacaaggtgcccatcgtcatcaccagcctcggtgcggtaaaggaattggtagatgccgttcacagctacggcggcctggtatttcatgacgtcactacccgacgccatgccgagaaagccgctgaagcgggcgtcgacggcctcattgccgtagccgctggcgcaggtggccacgctggcacctggagccccttttcactgattgccgaaattcgccagttcttcgacaaaacgctactgctggcgggctgccttaaccatgggcacgaaattcttgccgcccaggtgctgggggcagacctcgcttatttcggcacgcgctttatcggcaccaccgaaagccaggcaccggatgcgtataaagagatgctgctcacatcgcgcgccgccgacatcgtgcacactccagcagtctccggcgtacctgcaagcttcatgcgccagagcctggaaaatgccggttttgaccttgctgcgcttcaaggcaaaggtgaagtcaacttcggttccaagctcaagccattgagcgatgaggccaaagcgtggaaaactgtatggtctgctggccaaggcgtcggtgagatcaatgatgtacccactgtggatgagctcatagcgcgcctggatgccgaataccgcaaagcacgcgagcacgccgcgcaactgcgctggccacgctgacacattgccgggcctgccaactggacaggcctgcatactctccctgattaagtgacaaggatgcccgcatgagcgacagccgtttcaagattgtgtttgacggagccttgcgcccaggtgtcgaaagcaccaccgctaagctgaacctcgccgagttattcaaaagcgatgttgaagcgatcgaaaagctcttcaccggccgccccgtcgcgctcaaacgcgacctgtcccactccgacgctgaaacctacctcacggcactgcacaatgccggggtggacgcacgcatcgaagtcgaacaacccgtggcattcagcctggcagaaacccacgaaacaggctcgtcaaccgctgaccgcgccgccgcgtcaccttatgcaccgccacgcgctgccgttggcgacgacctgccggagttcgccactctaaaggtgttcaccatccacgggcgcatcgggcgcctgcgctacctggcctggacgctggcgctgaccgtcgcgatgctggtggcagcgggcatcatcagtacggtgggcttcgcggtggcgacagcctcgccaaccatcgccatcattattggctcactgctgggtttcgcgctgtttgtggcactggtagtggtgagcgtgcaaatcggcgtgcagcgcctgcatgacctgggctggtctggctggctgtacctgctcaacctggttccgctggtgaacagtgtgttccctctgctgttgctggtattgccgggcaacacgggcgccaaccaatacggcgcgccaccaccgcgcaactctactgcggtgaaaatcctggcctcgctgtggctggcgttcattcctttgatgctcatcatcgttgttaccctgggcatgaacggctacctggaccagcttgaagccaacatggacagcagctacgaaagcagctccatcacctccgatgcagacgccgatcaaagcgttatcgttgatgaagccgcagcgcaaagtgctgacgatgcagccgaacctgtagactctccagaacagtgaagaaacgcccgccgcctgtgacgcactgtcatgggccggcggcgttgcgatggagaaaggcatgacccgttacgctctgatcaccggcgcctccagcggcatcggcctggcattggccgaagccttggcacggcgcggccgcagcttgattctggtggcccgccagcgtgatcagttggaaagcattgcattggaattgacccaacgcttcggcgtagaggtgctgtttcgtgcctgtgacctgggcgaaccgctgcgtttgtccggctttttgctggaactcgaagagggtgagcggcagatcgacctgctggtcaactgcgccggcatcggcaccagcgggccgttcctggcccaggactggatgaccgagcaggacctcatcgaagtcaacatcctggccctgacccgcatgtgccacgcactcggcaatgccatggccctgcatggcggtgggcaaatcctcaacgttgcttccgtcgccgccttccagcccgggccgtggatgagcagctactacgccagcaaagcctacgtgctgcacttctccgaagggttgcgcgaagaattgaagacctgcggcatcaaggtgtcagtgctgtgccccggccctacgcgcaccgcattcttcggcactgcacagatggatacggcgaaactcgaccgcagccagcaactgatgagcccggaagaagtcgcgctctacaccgtacgcgcactggaaaagaacaaagccatcatcattcccgggcgccgcaaccgttggctgacgttcagcccacgcctgagcccgcgctggctgacccgcaaaattgccggcgccatcaacaaggcctattgcccacgctgacggcctgggtacactcacctaactttcacgatggagaaacggctgtggatactctgttcaccaagatcatcaacagagaaataccggcgaagatcatctatgaagatgaccaagtcctggcttttcacgatatcgccccgcaggcgccagtgcatttcctggttatcccgaaaaagcccattcgtaccctcaacgacttgaccgaagacgataaggcgctggccggccatatcctgttcaccgcccagcgcctggccgtggaacaaggctgcgaaaaaggctttcgcgtggtgatgaactgcaatgaagacggcgggcaaaccgtttaccacattcatatgcacgtgctgggtcagcgccagatgaactggccgccgggctgagtgcacaggggcaaattgactcagcacaaacgctggacgctctcttgcggtaaactggccgccgagattcttcccggaggtcagcatgactacccaacgtcactactcgccgattgaccgtctgttgctgcaagccgacatggccatgcgcaccctgctgccgttcagcggccagccctaccgtccatcgcccgccatcgtgcagccagatgtacagctaagcgagaccgacactcgacacgtcgctggcctgatgcgcatcaaccataccggtgaagtctgtgcccaggcgttgtaccagggccaggcgctgaccgccaaattgccgcaggtacgcacggcgatggagcatgcggccgaggaagagatcgaccacctagcctggtgcgaacaacgcatccgccagttgggcagccatcccagcgtgctcaacccactgttttatggcttgtcgtttggtatcggcgcggctgccgggctgatcagcgacaaagtcagcctggggtttgtggccgcgacagaacatcaggtgtgcaagcacctggatgaacacctggagcaactgccggccgaagacgaaaagtcccgggccattcttgagcagatgcgcatcgacgaagaacaccatgcagaaagcgcgctggacgcgggaggcttccgctttccagccccggtacggttcggcatgagcctgttggccaaggtcatgaccaaaagcacctatcgaatctgaaccgaaaaaaagggcgcccgaagcgccctttcttttgcctgctgcaatcaacccagctcgatgatttcgtagtcgtgggtaatgaccacgcccgccgcccccagcatgatcgatgctgagcagtacttctcggccgacagctcgatggcacgcttgacctgggcttctttcagcgcccggcccttgaccacgaaatgcatatggatcttggtaaaaaccttggggtcttcagtggcgcgttcggcttccaggaaggcttcacagctttccacggcctggcgcgacttcttcaagatgctgaccacgtcaaaattgctgcaaccgcccacacccagcagcaacatttccatcgggcgtacacccaggttacgcccgccggcttccggcggaccgtccatgaccaccacgtggccgctgcccgactcaccgaggaacatggcttcgcccgcccattggatgcgtgccttcatcgcccagactccactgctaaaaaagggtcgccagcttagcacagggctttgaaacagcagcgccctgcataaattcgataaatgacagcgtttgcccggtaaattggctaatcgtgacagaaggtgtctggtaagctggcgccaaatgaatggcgcattgccatgacttgtacagcgtctatcaatgagatgccgctggataaaaacaacgccaactacaccgcgcagtcttttcgggatacaaccatggttgctcttactcccacacccaagatcaaaaacctcgacaagctgctgttgcattgccagcgccggcgtcatccggccaagcacaacatcatctgcgccggcgagcgttcagaaaccctgttcttcattatcaagggctcggtcaccatcctgatcgaggatgaagatggccgtgagatgatcattgcctacctcaacaccggggatttcttcggggagctgggcctgtttgaacaagcaggcaaagagcaggaacgcagcgcttgggtaaggaccaaagttgaatgcgaagtggccgagatcagctattcgaaatttcgcgaactggcccagcatgatccggatatcttgtatgccctgagcggacagatcgcccagcgcctgcgtgacaccacgcgcaaagtcggcgatctggcgttctttgatgtcaccggtcgcgtcgctcgctgcctgctggagctatgcaagcaacccgatgccatgacccatcccgacggcatgcagatcaaagtcacgcgccaggagatcggacgtattgtcgggtgttcgcgggaaatggtcggccgcgtgctcaaggacttggaagaacgcaacctggtgcacgtcaaaggcaagacgatggtggtgttcggtacccgttaaaccggcaggaagccagccagcatctgccggtacaagatgtcgagccgactgatcgcatccggtgcgggaaacgcttcgtgcagtgcgatatggctatcggcgcgaacccgctgctccaagccgcaggcttgattgaagcggttgaccgccgcaatcaattcctcacgatcattttccagcaacatcgccccatgcaccaacccgaccgggcggccaccgctttgccgccaacgctgggcagtgcccaccattttgcggccattgaggttgacgttgtaacggccgtcgcaaaaggcaccgtcaatttcgccgacggacgcatcgccgcccaactcgatcaacagatcacagatcggttggcacaagcgccgatagccggtttcgatacgcccctggtcgccttcactgcgcggcggggcatagaccagggcgatattgaccgtggcgccggactgcggcaccggctcaccgccggtttcacgcagcaataccggccaacccgcatcggccgagacctggctcgccgcctcgaatgccggcaaccggctcaaacggcgcggcatgaccagcgcttggtcactgggctgccagaacagcaatccgaactcttgctcccccgcgcaaacggctgccaataggtcttgctcggctgcaaggcctgcttcgacagtcatgatcacgggctggagcatcgaacacctacctgaataaacacaaaacctaatgtgggagctggcttgcctgcgatagcggtgtgtcagctacacagagattggctgacccgccgctatcgcaggcaagccagctcccacagtttcgagcgtatttcaaatcaatccaacgtcgaaccgctgatcgtcgtaccgcgctccgggaagaacaaacgctgcaactccgcccccgggttctcggcgcgcataaaggtctcgcctaccaggaacgagtacacgccgctgatttccatcaactccacatcggcgcggttgacgatgccactttcggtaatcaccagacgatcgcgagggatacgcggcagcaggtcgagggtggtttccagactgacgtcgaaggtatgcaggttacggttgttgacgcccaccagcggagtatcgagggtcttcaatgcgcgctccagctcgtcgccgttgtgcacttcaaccaacacatccaggccgacgcttttggccacggccgccagctcggccatcttcacgtcatccagcgcggaaacgatcagcagcacacagtcagcgcccagggcacgcgcttcaacgatctggtacgggtcaaccatgaaatccttgcggatcaccggcaacttgcacgcagcgcgcgcctgttgcaggaacaggtcggaaccctggaagtagtcaatatcggtcagcacagacaggcaggtcgccccacccttctcataactggcggcgatttcagcaggtacaaagtgttcgcgaatcacccctttgctcggcgaagcctttttgacctcggcgatcacggccggctgcttgagcttggcctgagcgatcaaggcattggcaaagccgcgtggcgcctcggcgcttttcgcctgcgcttccaactcggccaggctcacacgggcgcggcgctcggccacttcttcagccttgcgggccaggatcttttccagaacggttggcacactcatccttcattctccatcttgaatacggcggtgaatgctcccagctcttcgagcttctcacgagccaggccggtgtgcagcgcatcgtgggccaaggcaacaccttccttgagactataggcatggtcggcggcataaagggctgcgccagcattgagcacaatcatttccgcagctttctgaccgttttcggtcttgcgacgccccagggcatcacgaatcagctccaacgaagccgccgggctttccaccgccaggccgtgcaggctctggcttttcatacccaggtcttcgggctcgacccaatattcggtgacctcgtcgttcttgagctccgccacaaaggtcggcgccgccaggctgaattcgtcgaggccatccttggaatgcaccaccagcacatgcttgctgcccaagcgctgcaagacttcggccaacggccggcacagcgcctggctgaacacacccaccacttggtgcttcacaccggccggattcgtaagcgggccgagcatgttgaacagggtacgcaggccaaggtccttgcgcgggccggcagcgtgcttcatcgcgccgtgatgggactgggcaaacatgaagccaatgccaacgctgtcaatgcagcgcgctacttgcaccggcgtgaggttcaggtaaataccggccgcttccagcaagtcggcactgccgctcttgccagacactgcccggttaccgtgcttggcgacggtgcaaccagcggcggccaccacgaaggatgaggcggtcgacacgttgaaaatattcgcaccgtcaccgccagtacccaccacatcgaccacgccgtcgagggtcttgagttcgaccttgtccgccagctcacgcatcaccgacaccgcaccgacgatttcgtcgatgctttcgctcttcatgcgcatcgccatcataaaagcgccgatctgagcatcggtgcattgaccggtcatgatctcgcgcatcacatcgctcatttccgcggtgctcaggtccagatggccgacgatacggctcagggcagtcttgatatccatgaaaagtccttagcgcgtgccgccgctctgcttgagaaagttggcgaacagctcgtagccctgctcggtcaggattgattcagggtgaaattgcaccccttcgatgttcagtgtcttgtggcgcaggcccatgatctcgtcgaccgagccgtcttccaattgggtccaggcggtcagctccaggcattcgggcaaggtttcacgcttgaccaccagtgagtggtaacgggtcacggtcaccggcaggttcaggccatggaacacacccaggtcgcgatggaacaccgggctggtcttgccgtgcataacctcgcgcgcgcgcaccacatcaccgccaaacgcctggccgatcgactggtgccccaggcagacgcccaggatcggcagtttgccggcgaagtactggatagcttccagagagatgcccgcctcggtgggcgtgcacgggccaggtgagacgacgatgcgctcggggttcaacgcggcgatttcggcaacgctgagttcatcgttgcgcaccaccttgacctcggcacccagctcgcccaggtactgcacaacgttgtaggtaaaggagtcgtagttatcaatcatcagcaacatgtgggttcaaacctcttgaattcactgatttcaaatgaccgccttccaagcgtgtgacccgctgccagacgcacgttccggttgccagggtgagttggcaaggggcgtcagacaacgggtgaagaaggcaaatcggtacaggtccggccaggccggcagagaaaaatgtcaggcgcgccaacgccaacgggcgtgtgccttgactactcgcatcaagagtttgctgatgatcaacacggggagggtctcattcatacgttcaggcacagtaacgtaggctcgccagcggtgcaatatggagccgcaaatacggggatgcaacgtaggcagattccggatttccctacagaaaatgccagaaattttgctagtgtttcacttccgacataaaaacaacccaatggaatcttgcatgctcagaccagcgtttttcgcgccccttgccggctgcctcctgtcattggcctgcgcccaggcgttcgcagccccgtcaccttattcaaccatggtggttttcggcgacagcctggcggatgcaggccagttccccgacggttcggccggcgccacattgcgctttaccaaccgcaccgggccgaccttccagggtgagtacggcctagtctcatcgaccctgctgggcgcgaaactgggcgtcgcccccaacgacctgaatgcctccacctcaccggtccgcgcagcccagggtttgccagacggaaacaactgggcagtgggtggctaccgtaccgacaacatcctcgactctattacctcagtctctgatgctgcgattcccccaggcaaccccggggccggcactgtgttgcgcagccggcagggctatctgccggccaatggtgggagagccgacccgaacgcgctctacttcctttccggtggtggcaacgacttcctgcaaggccgggtcctcagccccgctcaagcggtcgccgccggtggcaggctggcggacagcgcccaggctctgcaacaagccggcgctcgttacatcatggtatggatgctacccgacctggggctgacgccggccatcaacggcaccccacagcaagcagcgacctcggccctgagcactattttcaaccagtccctggtacagcgcctgtcacaagtggatgcgcaggttatcccgctgaacatcccgctgttgttgaacgaggctttcgccgatccggcccgcttcggcctcgccaccgggcagaacctgaccggcacctgcttcagcggtaacagttgcaccgccaacccaacctatggcatcggcggcaccaacccggacccaaccaagctgatctacaacgactcggtccaccctaccgtggccgggcaacgcttgattgccgactacgcctattcgctactcgccgcgccgtgggaactgaccttgctgccggaaatggcccaaggcacattgcgggcgcatcaagacgagttgcgcaaccaatggcaagcagacaacggcagttggcaagccgtcggccaatggcgcgccatagtggccggtggcggccaacgcctggatttcgatgatcagagcagctcggccagtggcgacggcagcggctacaacctgaatatcggtggcagctaccggctcgatgagagctggcgcgtgggtgttgccgccggcctgtatcggcagacactcgaagccggtgccaatgattcggactacaagctcaacagctatatgggcacggcattcgctcagtatcagcagaaccactggtgggccgatgccgcattgaccggcggcaagctggactttgacagcctcaaacgcaagtttgccctgggtgtcagcgaaggctcggagaaaggtgacaccgatggctggctctgggccctgagcggccgcgtggggtatgacatcgccgcaccgggcagcgactggcacctgtcgccattcatcagcgccgattacgcgcgggttgaagtcaatggctactcggaaaaaagcagccgctccaccgctctgacctttgatgatcaacaacgcgactccaagcgcctgggcgtcggcctgcaaggcagttaccgcatcacgccgcaaacccaggtctttggcgaagtggcccacgagcatgagtttgaaaatgacacccagaaggtgaacatttcgctcaacagcgtgcaggggatcgacttcaaactggacgggtatacgcctcgcagtaactctgaccgcttgagcctgggtgtcagccacaagctgactcaggacctggcgttgcgggcggcgtataacgtgaggagggatgacaacttgacccagcaaggcatcaatgtcggagtcagtctggatttctaaatactgcgcaaaataaatgtgggagctggcttgcctgcgatagcggtggatcagtcactgaatagctcaagtgacacaccgccatcgcgggcaagcccgctcccacattttttattccagctttagtcttgtggggtttgctctgccaacgccacggcacggaacatcgcccggcgcttgttcagggtttcttcccattcaagggccggcaccgagtccgccacaatcccgccaccggcctgcacatgcagttcgccatccttgatcaccgccgtgcggatcgcaatggcggtgtccatattgccgttccaggcgaaatacccgacggcgccaccatagacaccacgcttgaccggctccagctcgtcgatgatttccatcgcacggatcttcggcgcccccgacaaggtgcccgccggcaaaatcgcccgcagggcgtccatcgccgtcagcccggctttcagttcgccggtgacgttggacacgatatgcatcacattggaataccgctcgatgaccatcttctcagtcagtttcaccgagccgatttccgagacacgcccggtgtcgttgcgccccaggtcgatcaacatcaggtgttcggcgatttccttttcgtcgctgagcaggtcttcttccagcgccacgtcggcctcttcagtcgcgccacgggggcgcgtgccggcaatcgggcgcacggtgatcaggttgtcttcaacccgcaccagcacttccggcgaactgcccacgacgtggaagtcgccaaaattgaagaagtacatatacggcgtcgggttgaagcaacgcagtgcgcggtacaggtcaatcggcgccgccttgaagtcgatggacatgcgttgcgacggcaccacttgcatgcagtcaccggcgaggatgtattccttgatggtatcgacggcgcgctcgtagtcatcctgggtaaagcttgagcggaacaccgggtcggccgccggggggcggctgaggtccaggccgcgacgcggggtgatcggctggcggagtttttccagcagcgcttccaggttggcctggccttgttcgaaggcatcagcctgggcaggatcggcgaggacaatcgcatgcatcttgccggcgaggttgtcgaacaccactaccgcgtcggacaccatcagcaaaatatccggcacgcccagcgggtccgggttcgggcatttgcccaggcgcttctctacatagcgcacgcagtcatagccgaagtatcccaccagcccgccattgaaacgcggcaggccagcaatggtcggcacgttgtagcgcgccttgaaggcttcgacaaacgccagcgggtcttctacgtcatggctttcgatctctacgccgtcatgagtgatgctcacatgatggtcgtgtacccgcagcaccgtgcggcatggcaggccaatgatcgagtaacggccccacttctccccgccctgtaccgactcgagcaggtaagagttgggctcgtcggccagcttcaggtagatcgacagcggcgtgtcgaagtcggccagggtttcgcaagccatggggatacggttatagccggcagcggctaaacgcaggaatttttcgcgggtcatgaggtgcctcgtggtgtgagggtcaaacagtcaggtaggcaaacgtgccgcacacgcggccaggatcagtcaggcgcgccaacgccagcgggccagggccttgatgactttcatccagagtttgcgagtgaccaccacgatggaatttccagaaggggacgaatcaatatcgggcaacgttatctcagcgccagcgcccaagcaaccggggattagcagtcgcaggtcatcaatcaccagcgcaggggactcctccgcaatcggccggccatggttgtaaccataactcaaggccacgcactgcacgcccgccgctttcgccgccagcacatcactgcgcgaatcgccgacaaacagcgattgagacgccgggatattggccattttcatcacgaaaaacagggccgccgggtcgggctttttctgcggcaaggtatcgccgccgatgatccagcggaagtagcgaccgattttcatctggtccaacaacggcgcaacgaagcgctccggcttgttggtgatcagggccatttccacgccctgcttgctcaaccacttgagggtgtcgcgcacgccggggtaaaccacggtcagctcgtggctgctttcataagcggcattgaacagttccaaggcatgttctgcctcgacctcatccacacccgtggcatcgatgttgttggccaaggcccggcgcaccaacatcggggcgccattgccaacccattcgcgcaccgactcgatccccgccggcttgcgccccagcttgagcagcatctggtccaccgcggctgccaggtcgggcaccgagtcgatcaaggtaccgtccagatcgaacatcaccagccgtggcaatttgccggggaacaactgctcaaaaccgctcatggacgcgccagcgccagttcggcacgcatcttgtcgatgacggtctggtagtccggggcgttgaagatcgccgagccggccacgaaagtatcggcacccgctgcggcgatctcacggatattgttgacgttgaccccgccgtcgatctccaggcggatgtcacgccccgacgcgtcgatcagcgcacgtgcctcacgcagcttgttcaaggtgccagggatgaacttctgcccgccgaaacctgggttgacgctcatcagcaagaccatgtcgaccttgtccatcacgtactcaagcacgctaagcggcgtggccgggttgaataccaggcctgccttgcagccgccttcgcggatcagttgcaaggtgcggtcaacgtgcaacgtggcttccgggtggaaggtgatgtaagtcgcacccgcctcgatgaagtcaccgacgatacggtccacggggctgaccatcaggtgcgcatcaatcggcgcggtgatgccgtacttgcgcaatgcggcgcacaccatcgggccgatggtcaggttgggtacgtagtggttgtccatgacatcgaagtgcacgaagtcggcaccagcggccaacaccttgtccacttcctcacccaggcgggcgaagtcggcagagagaatcgatggagcaatgacgaagggctgcatgacgcaccttttttgagctaaatcacgatggcgcgcattgtatacctcatgctttgctgcgcgcaccgtgacctatctcaacggttagtaagctgcccggtagattttttcgatatcggcggcactgagcttgcgcgggttgttgcgcatcaagcgctcaatacctgcggcttcactggccatggccgggatggcgtcctcgggcacgccgaaactgcgcaggccggacgggatctccaccgccgcacacagccgcgtcatcgccgctacagcctggtcggcagcgtcattcacactcagaccggcgatattgacgcccatggcctgggcaatgtcctgcatgcgctccacgcaggccaatttgttccaatgcatgacatacggcagcaacagcgcattactgacgccatgggcaatattgaagcgcccacccaacgggtacgccagcgcatgcacggcaccgacgcccgcgttgccaaaggccatgccggccatcaagctggcggtggccatgtcgtcacgggcttgcaggttggccgggttggcgtaggccttgggcaacgcgctggcaatcaatttgatcgcaccgatagccaaggcgtcggtaatcggcgaagcattcagcgacaggtaggattcgatggcgtgcaccaaggcgtccacgccactggcggccgtgacaccgcgtgggcaggtcaaggtcatttgcgggctgatcagcgcgacatccggcagcaggtaatcgctgacaatgccttttttcagctgtgccgccttgtcggacagtatcgccacattggtcacctccgagccggtgcccgccgtggtggggatggcgatcaacggcgggcctttgcgcggcacctgatcaacgccgaacaggtccgccagcgcgccgtgataaccggcataggccgccacgctcttggcgatgtcgatagcactgccgccgcccacaccgatcaggccgtcatgcccgccttcgcggtacgcacgcatgcagtcttcgacgatggcaatttccggatcgggcagcacgcggtcgaaaatttcgtaggctcgatcacccagatgctccaaggccagcgctacggtgccggactggaccagcgcggcgtcggtgacgatcagcgggttatccacatccaggcgcgtgagctcggcagccagttgttcgatggcacctgcgccggtcagcagtttgtgggcgatcttaaatgaggatgtactcatgtgcgcggcctcttatgaagggtgggctggcacaagaatagctgcccctggcgtgttgtctgccattcattggttgaatggtcgcgccgcgcccatcaaggcagctaacaaaccgccgatagcctgttggtaacgagaaccgcccctcatccccctgacaaataccgaccaacccattaggctgctggaatcacttctggccgggaatcaacgatgctttttattcaccgttcggcactgccagcactgtgcctgtcactcctgtttaccagcgtcttgcctgttcaggccgaggatgcaccctcgcctgccgtcgaaaaaccggctgaacgccagcccttgcccgagcgtagccagcaagaagccagtgcgctcgaacggcaggtgccgcagcaggagcaacagcaattgcaggcgggtagcgattcgttcctggcgctgtggaaacctgccaacagcgccgaagccgagggtgtggtgatcctcataccaggtgctggggagaacgcggactggccgcaggccatcgcgcctctgcggcgcaagttgcctgacgccgcctggggcaccctcagcctgtcattgcctgacgtcaatgtagacaccctgccgccacgggtcatcgaaccgccgacagcggcggtcgataccagcagcaaggaaggcagcaccgctgccaagccggtcgaacaggccgccagcgccgaggccgaaggcactgacccggcggtggtgccgggggcggatgagcaggacaagaccgacgccaagcgcatcttcgaccgtatcgacgccgccgtcgccttcgcccagacccaaagcgcccgcagcgtggtgttgctcggccatggcaccggcgcctggtgggcagcccgctacctgagcgagaaacaaccttctcaagtgcagaggttggtgatggtagccggcaagacgcctgcggctcgccaaccggacctgcaacaactggcgccggccttgaaggtgcccacagcggatgtgttctatcaagagggcgctcaggatcgcaaaaacgctcaggaacgacttcagacggccaagcgctcgaagaatgacggctataagcaggtgtcgctcacagcgttgcccggtaatagcgccgcgcagcaagagcagttgtaccgcagggttcgcgggtggttgagcccgcagggcggcgcagactgacagggcaacatcgctttctgtaggagcgagctcgctcgcgaaaaacgtcaacgataatgcgtgcgtcctgaataaacgcggtgcctgggagtttttcgcgagcaagctcgctcctacagggtattagggcttgccccttccacagggagttgaatggcgatggcctcagcgaaaatcccgccgctcgcgaatcaacgcataggcgttatgcaattcacgggttcgttcggtcgcctcccgcacttgcgcggggctggcacccgtgccggcgatcttgtccggatggtggcggctgagcagtcgacggtaggcgcgcttgatcaccgaaggttcagtggttgccgtcacccccaggatacgcaacgcctcctgataggcaccgccacgattggccaccggcttgcgctccggcgcgtaatcgctcgccaatgcctgtagctgttgcggcgtccagcccaaccacttgccccactggtcgatcaggtcgcgctcggcagcatccgctcgaccgtccgcccacgccatgcgccaacaggcgcgcagcacgccttccgccgcatggggctgcgccttgagcacccgcaggtaactgcgtacccggtcgctgccggacttgccacggttgaaggcgctgatcgcgcggcgctgggccggctcagtcatgtccagtgcacgcatttcctggcgcgcttgctggatatgcccatcgactacccggccgttactcttggccaagcgccccagcagcacaaacaacagttcatcgttgcgcaaggccgggcgcccacccaggcgctcacgtaactgcgcccagctgtgcagttgcaaacggcggtccagcgcctgccccagcaatgcccccaacaaagcccccggaatactggcaatggcaaagccaaccccggcgccgatcagcgtccctggccacaacatcctactgccccgctatcagcaaggtttcgacctgcgccagtcgctccagcgtccccacatccacccagcgtcctgccatgtgctcccccgttaccaaacctttggccatggccgcgcgcaacagcggggccaacttgaaggcaccggcgctgcaacccgcgaacaatttagggtcgagcactgaaatgccactgaaggtcaggttatcggcaccgggcgcggcatcatgaagcacaccgtgatccaggtagaaatccccgcccgacgggtggtgtgcagggttgtcgaccatcaccaagtgcgccaggccccggatcggctgcttgagctgggtgaactcgtagtctgtccagatatcgccattgaccaccagaaatggttcgtcgcccaacagcggcaacgcctggaatatcccaccccccgtttccagcggttcaccctctggggagtagcggatgcgcagaccaaactgggcgccgtcgcccaagtagttttcaatctgctggcctagccatgcatggttgatcacgatctcggtaaagccggccttagccaaggcttcaaggtgatactcgatcagccgcttgccgccggcttgcaccagcggcttgggcgtatgcagggtgagcggacgcatgcgttcgcccttccccgccgccaggatcatcgccttcatacgctggcctcggcaggttcgcgcagactggcgagtaactcgcccaggtcactcaactcaggtcggtcggccagcaccgcttctatataagcaaagaaacgcggcacgtcggccaggtagcgtggcttgccgtcgcggtggcagatacgcgaaaagatgccgatgaccttgaggtgacgctgcacgcccatcaggtcgctggcacgcagaaactcttcaaagtcgtcctgcacgggaatccccaactgcccggcgcgctgccaatagccacgctgccattcgcgcacgcgggcctggggccaactgaggaaggcgtccttgaacaggcaggtaatgtcgtaggtcaccgggccgtagaccgcgtcctggaaatccagcacgccagggctcggctcactgatcatcaggttgcgcggcatgtagtcgcggtgcaccagcaccttgggctgggccagggcgctgtcgatcaactgctggctggcgcgttgccagagggcctgttgctcagcatcgaggtcgatgcccaggtgacggcgcacgtaccattccgggaacaattccagctcgcgacgcaataacgccacgtcgtagctgggcaatggggcatccatcggcaattgctgaaaagccaacaacgcgtcgatggcatcggcaaataattggtcggcgttttcaccgtcaatcacgtccagataggtttttgtgcccaggtcattgagcaaaagaaagcctcggggcaaatcttctgcataaatttttggcacatttattcccgatttcgcgagcaaatgcgcgatatcgacgaaaggtttgcagttttcctgggggggtggcgcgtccatgacgacgaacgtatgggcaccgccctcccatcggaagtaacgcctgaaactcgcgtcgctgctggccgcggtcaatgtggccgggggcacggggccccagtcctgagcgttgaagaggatcggcaactgctcatccagccagacttccagctgttgtaaacgtagatcgtgctcgggcattacaagggtctccgacggcgctagccgtcaagcggggcatgctttattatcacgcatctttttcagaccatcgagaggcgtgcggcccaaaccgcgggcagatggcacgcaggaagcccggactaataagatggcattgaaatcccccgcgtttcgtagaaaatttccgttgctggtaaccggcagtctgctggccttgcaacctttcgccacctcattcgtggtcgccgcggaacagtatgactgctcagtctctgcttcgggtgcctgggattgcgcgccgaagacggccgccgccccattgccaccgcgcccggtgcatgacggcgctgccgtcagctcggccaacagcacgccgcaaggcaaagctggcggcagcgtcgacgccgagcccaagaccatgctggtcaccgagtccaagggccgtggcctgcgttcgcgcagtgccgactacagccacctggactgggtacctcgcgacaagctgaccgcagcacagttggccgaaaccggcccttactgcggcggcgcctacatcgagccgactcgtcctggcatgaacgacaagacgaacaagagcgatgcaccgaccttcatcggcgccaaggcctcgcgttacgagcaggagcagcaggtcgctaccctggccggtgacgtggtcatgcgccaaggcagcatgcaactggaagcggacgaagccagcctgtaccaggctgagaaccgtggcgaactaaatggcaaggtgcgcctgcgcgacaacggcgccctgatcgtgggcgaccatgcccaggtccagctcgacaccggcgccgcccagatcgacaacgccgaatacgtgatgcacaagtcacgcatccgcggtaacgcgctgtacgccaagcgtgcagagaacgcgatcatccgtctcaaggacggtacgtacaccacctgcgagccggacagcaacgcctggcagctcaagggcaacaacatcacgttgaacccggccactggtttcggtacggcgaccaacgcgacgttgcgggtcaagaacatcccgatcctgtacaccccgtatatctacttcccgatcgacgaccgtcgccaatccggcttcctgccgccgagcttcagcaccggtggggaaactggctttacgctggtaacgccgtactacttcaacttggcaccgaactacgatgccacgttgtacccgcagtacatgaccaagcgcggcatgttgatggagggcgaattccgctatctgaccaagtcgagtgaagggcagtttggtggggcgtacctcaacgacgacaatgacgagcggaagaagcagaccgattacgaaaaaacccgctatatgctcaattggcagcataagggcgggttggattcgcgtctgacgacccaggtcgattacaccaagatcagcgatccgttctacttccaggatttgaagtcgtaccaggaaggtgttgaaagccaggacttcctgaaccagcagggttctgtgagttaccgtggcgatagctatcaggctcgtctgaacttgcagtcgtaccagttggcgacgatttcccagatcactccgtatgatcgactaccgcagattaccttcaatggtcagctgccgtatcatccgggcgggctgaatttcgcgtatgaaacagaagctgtaaggtttgatcgcgatctcagaagcggcagagtttttggtgaagatggcggcccacccggcggcgatctgcgcctggatgaatacgtaaacggcctaacccgcgcaaacggcactcgccttaacgtggcgccgagcgtcgaatatccgatgaactggacctatggtttcataacgccaaaactgaaatacgtttacaccaagtacgaccttgatcttgacagtaaaggcaagaacgatatcgtcgcggcacaagcagcggctgtggccagtggcagcaagtatgcaggcggcacgtttaatagctctcaggatcgggcaattccaattgccagcatcgacagcggcctgtacttcgaccggaagaccaattggttcggcaaagactataaccagactcttgagccccgcgcgtactacctctatgtgccgaataaagaccagggcgatattccggtattcgacacaagcgagtactcgttcagctacgcttctctattccgtgacaaccgctttagtggcacagaccggatcggcgacgagaacaagctttctctcggagtaaccagccggtggattgaagagaatggtttcgaacgccaacgcgtttccgtcggccaagcgctgttcttcaaggatcgcgaggttcaactgccaggaattctggccgccgaccgagatgatgctcgtacagacgtctcgccaatcgcgcttgaatatgaattccgcttcaaccgcgactggcgcgccacagctgactacaactgggacaccgaaagccacgccccacgttccggcagcgcgatgttccactaccagcctgaagacaaccctaacaaggtcgtcaaccttggctatcgctaccgcaacgaccaagtggtctacaaccagctgaccggcaaatggcagttcggtggggactacggcacaccaggtcaagagaactacgtgaaggattactacaaaatccaacaacacgacttctcgatgatgtggccgatcattccgcagtggaacctgatcactcgctggcagtatgactatgcccgcaaccgtaccctggaagcctttggtggcttcgagtacgacaactgctgctggaaactgcgcgtcatcaaccgttactgggtttccaacgacgaatatacccagatcgccccccttaacgaaaagggtgaccacgggctcttcttccagatcgtcctcaaaggactcggcggcctgaccggcgccaaggtagagagcttcctcgacaaaggcattgaaggttatcgtgaacgtgaagacaaagctttctgagtgtttgcgcccgctagtgctgggcgcgctgttcctgggtactgtttcggcacacgccgcagttcaacagctggataaagtagcggccatcgtcgacaacgacgtgatcatgcagagccagctggaccagcgggtcaaggaagttcagcagaccatcgccaaacgtggcggtggggtgccaccgactagcgtcctggaatctcaggtactggaacgcctgatcgtcgaaaacctgcaactgcagattggcgaacgttctggcatccgtatttcggacgaggaactgaaccaggctgttggcaccattgctcaacgcaacaacatgagcattgatcagttccgcgcagccctggcccacgatggcctgtcctatgaggacgcccgtgaccagatcaagcgcgaaatgatcatcagccgtgtgcgccagcgccgtgtggccgaacgggttcaggtgtccgagcaggaagtgaagaacttcctggcttcggacctgggcaagatgcagctttccgaagagttgcacttggccaatatcctgattccaaccccggacggagccaactctgagcagctcaatgccgccgccgctaaaacccaggcgatctacgagcgcctgaaagcgggtgcagattttgcccagatggccattgctcaatccggcagcgataacgccctcgaaggcggtgacatgggctggcgtaaagcggctcaattgccacctccgtttgatcgcgaattgagcgccatggaagtcggcggcattacccagccagcccgcaccccgggtggtttcatcatcctcaagctactggaacgtcgcggcggcgaaacctcgttgaaagacgaagttcatgttcgtcacatcctggtcaaaccgagcgaaatccgcaccgaagcacaaaccaaggaactggcccagaagatctatgaccgcattgaaagcggtgaagacttcgccaccctggctaaaagcttctcggaagacccaggctctgcccttaacggcggcgacctgaactggatcgacccgagggcactggtgcccgagttccagcaggtcatggccgacacgccacaaggtgtattgtccaagccgttcaagacccaatacggttggcatgtcctggaagtccttggccgtcgcgccactgacaacaccacccaggcgcgcgagcagcaagccctgaccgtgttgcgtaaccgcaaatacgacgaagagctgcaaacctggctgcgtcagatccgtgacgaagcttatgtagagaacaagctgccaggcgccgagcaaacaggcaccgaccaggcaacccagtgaaaccccagtgtttcgcggtgacacccggcgagccggccggcattggtccagacctgtgcctgctgctcgcctcgcaaccccagccacaccccctgattgccattaccagccgcgacctgctcctcgagcgggccgcgcagctgggtgtgaccgtcaacctgctggacgtggggccaggcaactggcccgacctgccggcccccgccggcagcctgtatgtgtgggacaccccgctgcaagccaaagtggttgccgggcagttgaatacggccaacgcggcatttgtgctggagacgttgacccgtgcgggccaaggctgcatcgacggcgacttcgccggcatgatcaccgcaccggtgcacaaaggcgtgatcaacgaatccggcatcgccttttccggccataccgaattcctcgccgaactgacccataccgctcaagtggtgatgatgctcgccacccgtggcctgcgcgtggccctggtgaccacccacttgccgctgcgtgaaattgccgacgccatcactgccgaacgtgtggagcgtgtcacgcgcatcctgcacagcgacctgcaacacaaattcggcattgcccaaccgcgtatcctggtctgtgggctcaacccccacgccggtgaaggcggccacttgggccatgaagaaatcgacatcattgaaccgacattagagcgcctgcgccaagaaggcatggacctacgcggcccattgcctgcagacactctgttcacccccaaatatctggagcactgcgatgcagtgctggcgatgtaccacgaccaggggctgcccgtgctgaaatacaaaggcttcggcgccgcagtcaacgtgacactgggcctgccgatcatccgcacctccgtcgaccatggcaccgccctggacctcgcaggcagcggcaagatcgataccggcagcctgcacgtggccctggaaaccgcctatcagatggccgagacccgtatatgactgagcattaccaacaccgggcgcgcaagcgcttcgggcaaaacttcctgcacgacgctggcgtgatcgatcgcatcctgcgctccattcatgccaagcctgaagaccgcctgctggaaatcggtccgggccagggcgcgctgacccaaggcttgctggccagcggtgggcaactggacgtggtggaactggacaaggacttgatcccgatcctcaaccagcagttcgctggcaaagccaacttcaacctgcaccagggcgacgcgctgaagttcgacttcaatagccttaacgccgcgcctaacagcctgcgggtagtcggcaacctgccctacaacatttccacgccgctgattttccatctgctgaataacgcagggatcattcgcgacatgcacttcatgctgcaaaaggaagtggtggagcgcctggccgcgggccctggcggtggtgactggggccgcttgtcgatcatggtccagtatcactgccgcgtagagcacctgttcaacgtcggcccgggcgcgttcaacccgccgccgaaggttgattcggccatcgtgcgcctggtgccgcatgccgtgctgccgcacccggccaaggatcacaaactgctggagcgcgttgtgcgtgaagccttcaaccagcgccgcaagaccttgcgtaacaccctcaaggccctgctgagcaatgccgagatcgaagccgccggcgtcgacggcggcctgcgccccgagcaactggacctggccgcgttcgtgcgcctagctgaccagcttgccatccagccagcgccaacagcggaataaggttcaacaccctccaatctgggagcgggcttgctcgcgaatgcggtgtgtcagtcaacattttcgtcaactgatacaccgcattcgcgagcaaccccgctcccacaggtttaaccgcgtttcaagagcccagacagcatgtctggcctagtgccctcctcttggcctagactgacccgcatctgctgtccttcgcttttaaggcctcttgcatgtccgatcctcgttatcagatcgacgtcagcgtcgtcacccgcttcctggcggaccaatcgcaacccgaacataaccgcttcgcctttgcctacaccattacagtgaagaacaacgggctggtgccggccaagctgctgtcgcgccactgggtcatcaccgatggcgacggccaggtcgaggaagtgcgcggggcaggcgttgtcggccagcagccgttgatcgacagcggcgccagccacacttatagcagcggcacggtgatgacctccaaggtcggcaccatgcaaggctcgtatcagatgaaggccaccgacggccaactgttcgatgcaatcatcaagcccttccgcctggccgtgcccggagccctgcactgatggcgacgtacgcggtcggcgatctgcaaggctgcctggaccctctcaagcgcctgctggagcgcgcagccttcgacccggcaaatgatcgcttgtggttggtgggcgacctggtcaaccgcggcccacagtccctggaaaccctgcgctacctctatagcctgcgtgattctttggtatgcgtgctgggcaaccatgacctgcacttgcttgcggccggcaacaacatcgagcgcctcaaaaaaggcgacaccctgcgggaaatcctcgacgccccggaccgcgctcaactgctcgactggctgcgccggcaaaaactcatgcactatgacgaggaccgcaacatggccttggtgcatgccggtatcccgccgcagtggacgctgaaaaaagccctcaagtgcgccgccgaagttgaaagtgcgttggccgatgacaacctgtacaccgcttacctcgacggcatgtacggcaacgatccggtgaagtgggacaacgacctcacgggcgtggcccgcctgcgagtcatcaccaactacttcacgcggatgcgcttctgtacggccgaaggcaaactggacctcaagagcaaggaaggcgccgacaccgccctccccggctacaagccctggttcgcccacaaggaacgcaagacccgtgacacaaagatcatctttggccactgggccgcgctggaaggcaagtgcgatgaacccggcgtgttcgccctcgacaccggttgcgtgtggggtggcgccatgaccctgatgaacatcgacacgggcgagcgcctcgactgccagtgccaatcccccctttccattacccagccggccgccaccaagccataggagcccgccatgaccgaattcaaacgtatcccccccgaacaagcccaggccctgcgcgagcaaggtgctgtagtcgtcgacatccgcgaccagcctacttatgccgccgctcacatcaccggcgcccagcacttggacaacgtcaacatcgccgacttcatccgcgcagccgacctcgatgccccgctgatcgtggcctgctaccacggtaattccagccagagcgctgccgcgtatctggtcagccagggtttctgcgacgtctatagcctggacggcgggtttgagctgtggcgtgcgacctttcccgcggaaatttcttcaggcgattcgcaataatttttttcacaccccgctaccccgcgtgacgcttgggcttgcgccgtttctgacgaacggcgcagccaaactaattacgcatcgcgccttgacctcccggattccgaactatccttaagcgcaggccatccgaatcaggggagagccggtacaccggcgtacgggtcatcggtagcgtttcagggtgttctggggggaaaacagccattggcgtgcgtcaatggctgccagcatcgactgattgatccggcgtcggctccacgtatcgagcgaggtgacgacgtcatgagtatttttagccacttccaacaacgcttcgcgtccacacagcaggaagaactcacgcttcaggagtatctcgagctgtgcaaacaggaccgcagcacctacgcttctgccgccgaacgcctgctactggcgattggcgagccagaactggtggaaaccgccaataattcgcgcctgtcgcggatattttccaacaaggtgatccgccgctatccggcctttgaagacttccatgggatggaagaatgcatcgaccagatcgtttcctacttccgccatgccgcccaaggcctggaagagaagaagcagatcctctatctgctcggcccggtcggcggcggcaagtcgtccctggcggaaaagctcaagcaattgatcgagaaggtgcccttctatgcgatcaagggctcgcccgtcttcgagtcgcccctgggcctgttcaacgccacggaagatggcgcgatcctggaggaagactttggcataccgcggcgctacctcaacaccatcatgtcgccctgggccaccaagcgcctggccgagttcggtggtgatatcagccagttccgcgtggtgaaactctacccgtcgatcctcaaccagatcggcgtagccaagaccgaaccgggcgatgaaaacaaccaggacatttcagcgctggtgggcaaggtcgatatccgcaaactggaagaattcccacaaaacgatgccgatgcctacagttactcgggcgcactgtgccgggccaaccagggcctgatggagttcgtggagatgttcaaggcaccgatcaaggtgctgcacccactgctcaccgctacccaggaaggtaactacaacagtaccgaaggcctgggggcgattccatttaccgggatcctgctagcccactccaacgaatcggaatggcataccttccgtaacaacaagaacaacgaagccttcatcgaccgtatctatatcgtcaaggtgccgtactgcttgcgggtcagcgacgaaatcaagatttacgacaaactgctgttcaacagctccctggccaaggcccattgcgcgcccgacaccctgaagatgcttgcccagttcaccgtgctgtcgcgcctcaaggagccggaaaactcgaacatctattcgaagatgcgcgtctacgacggcgaaaacctcaaggacaccgaccccaaggccaagtcgatccaggagtaccgtgacacagccggtgtggacgagggcatgaatggcctgtcgacccgctttgcgttcaagatcctgtccaaggtcttcaacttcgacccccacgaaattgccgccaacccggtgcacttgctctatgtgctggaacagcagattgaacaggagcagttccaggccgaaacccgtgagcgctacctgcgctttctcaaggaatacctggcgccgcgctacatcgagtttatcggcaaggaaatccagaccgcttacctggagtcttacagcgagtacggccagaacatcttcgaccgctacgtgctgtacgccgatttctggattcaggaccaggaataccgcgacccggaaaccggcgaaatcctcaaccgagttgccctcaacgaagaattggaaaagatcgagaaacccgctggcatcagcaatccgaaggatttccgcaacgaaatcgtcaacttcgtactgcgggcccgtgccaacaacaacggcaagaaccccacctggctcagctacgagaagctgcgggtggtcatcgagaagaaaatgttctccaacaccgaggacctgctgcccgtcatcagcttcaacgccaaggccagcaaggaggatcaacaaaaacacaacgacttcgtcacacgcatggtcgagcgaggctacaccgacaaacaggtacggctgctctccgagtggtacctgcgggttcgcaaatcacagtaaggcagcggcaagcgcacactgccaggcatccggcctggcagttgaccgcttgtctctaagcttccagctcgcggcttgaagcttgtaacgtgaagctgcccggagggctccccatgagctatgtgatcgaccgacgcctcaatggcaagaacaaaagcacggtaaaccgccagcgtttcctgcggcgttaccgtgaccacatcaaaaaggcggtagaagaggccgtcagccgccgttccatcaccgacatggagcatggcgaacaaatcagtattcccggccgggacatcgacgaaccggtgcttcaccatggtcgcggcggcaaacagaccgtcgtgcaccccggaaacaaggaatttaccaccggcgaacatatccagcgcccacaaggcggtggcggtggcaaaggcccgggcaaagccggcaactctggcgaaggcatggacgaattcgtcttccagatcacccaggaagaattcctcgaattcatgttcgaagacctggaactgcccaacctggtcaagcgcaacctcaccggcaccgacaccttcaagaccgtacgcgcagggatcagcaacgagggcaacccttcgcgcatcaacatcatccgtaccctgcgctcagcccatgcacggcgcatcgccctgtcgggcagcagccgcgccaaactcaagcaggccaaggaagagttggcacgtttgaagcgtgaagaaccggacaacttcggcgatatccaggaaatcgaggcagaaatcgaaaaactcagcgcgcgcattcaccgcgtgccgttcctcgatacctttgacttgaagtacaacctgctggtcaagcaacccaaccccagctccaaggcggtgatgttctgcctgatggacgtttccggctccatgacccaggccaccaaggacatcgccaagcgtttctttatcctgctgtacctgttcctgaaacggaactacgacaagatcgacgtagtattcatccgccatcacaccagcgcccgagaagtggacgaagaggagtttttctactcgcgggaaaccggcggcaccatcgtttccagtgcactgaagctgatgcaggagatcatggctgagcgctaccccgccaacgagtggaacatctacgccgcccaagcttccgacggcgataactggaacgacgactcgccgatctgccgggacattttgatcaaccagatcatgccgttcgtgcagtactacacttacgtcgaaatcaccccccgtgagcaccaggccctgtggttcgaatacgagcgcatcggcgaagcctttgccgacacgttcgcccagcagcaactggtctcggccggcgatatctacccggtcttccgtgaactcttccagcgcaggttagtgacatgaccgccaaaaaagagaacaagcgccaacccatttccactggctccgagtggaccttcgaactgatccaggcctatgaccgggaaatcagccgtatcgcggcgggttatgccctggacacctaccccaaccagatagaagtcatcaccgctgaacagatgatggatgcctatgcctcggtgggcatgccgctgggctatcaccattggtcctacgggaaacacttcctcagtaccgagaagtcctacacacgcggccagatgggcctggcctacgagatcgtgatcaactccgacccgtgcatcgcgtacctgatggaagaaaacaccatctgcatgcaggcgctggtagtggcccatgcctgctatgggcataacagtttcttcaagggcaactacttgtttcgcacctggaccgatgccagttcgatcattgattacctggtgttcgccaagcaatacatcatgcagtgcgaggagcgccacggtatcgatgcggtggaagacctgttggactcctgccatgcgctgatgaattacggggtcgatcgctataagcgcccctatcctatttccgccgaagaggagcgcctgcgccagaaggaacgcgaggagcacttgcagaaacagatcaacgacctgtggcgcaccatccccaagcgcgccgacaagaacagcgacaaagacaatgcacgcttccccgccgaaccgcaggaaaacatcctgtatttcctggaaaagcatgccccgctgctggaaccctggcagcgcgaaatcgtgcgcatcgtacgcaagatcgcgcaatacttttatccacagcgccaaacccaggtgatgaacgaaggctgggctaccttctggcattacaccctgatgaacgacctgtacgacgaaggcctggtcacggacggctttatgatggagttcctcacgtcccacaccagcgtggtcttccaaccaggcttcgacagcccgtattacaacggcatcaacccctatgcgctgggttttgccatgtaccgcgatattcgccgtatgtgcgagcaccccacagaggaagaccgccgctggttcccggaaatcgccggcagcgactggctatcgaccatcaagttcgccatgagcagcttcaaggatgagagttttatcctgcagtacctgtcgccccaggtgattcgcgacctcaagctgttcagcatcctggacgacgacctcaaggatgacctggtggtgcctgccatccacgacgaacccggctaccgcatcattcgcgaaaccctggccgcgcaatacaacctgggtaaccgcgagcctaacgtgcagatctacagcatcgacgtgcgtggagaccgttcgctgaccttgcgtcaccagcagcacgaccgcaaacccttgggcgaatccactgaggaagtgctcaagcacctgcatcggctctggggttttgatattcatctggaaaccctgcagggcgaccaggtgatgaaaacccaccatgtgccaccccgcagcgatcataacgacaacgactacggccgcctggacatggccgtcgttcacctctgaaacagcaaagcctccattggccaggctcaggcgttatcctgtgccgctaatggaggctttttcatgaaaatctacaaagtcggcggcgccgtgcgtgatcgccttctgggcatcgaggtcactgatatagaccgtgtcgtcgttggcgcgacggccgaagagatgctcgccaagggttataaaccggtgggcgccgatttcccggtatttctcgacccgaagaacggtgacgaatacgccctcgctcgcaccgaacgcaagaatggccggggttacggtggcttcatattccatgcgagccccgacgttacactggaagaagaccttatacggcgtgacctgaccatcaatgccatggcagaggacgacgaaggtaatctgactgacccttaccatggccaacgcgaccttgaagcgcgtattttgcggcatgtttctcctgcgttcgccgaagatccactccgagtgctgcgtgttgcacgcttcgccgcgcgctatgcgcctcttggcttcacagtcgcccccgagacgctggcgttaatgcgccaactcagtgagtccggcgagttggaggcccttacccccgagcgcagctggaaggaaatctcacgggcgctgatggaagctcaaccccaggtatttattcaagtgctgcgtgactgcgacgcgctgaaaaccttgatgccggaagtgaatgcgctgttcggcgtgccgcagcccgcagctcaccacccggaaatagacaccggcgtgcacaccttgagcgtgctggagcaggccgcccagcacaagcaaccgctgagcgtgcgctgggcctgcctgctgcatgatttgggcaaaggcctgacgcctgtggataagttgccgcagcatattgcccacgagcaacgcggcctgaagctgatcaaagcggtgaatgagcgtttcaaggtaccgagggattgccaggaattggccttactcgtggggcaatatcatacccatgggcatcgtgcgctggagctcaagccctcgacattgctggagttgctgcaaagcttcgacgtgtaccgtcggccgcaacgctttgaagagttcgtggtggcctgcgaaatggacgctcggggccgcaagggttttgagcaacgcagttatccacaggccgattacttgcgcgcagcggcaaaggctgcacgcgaagtgccggtcgcgccactgctggaaaaaggtttcaagggccccgagctgggcgaggcgctcaagcgcgaacgactcaaagcgcttaaagcctacaaggaacagcaaaagcccctgtaggagcgagcttgctcgcgaagaacctcaacgatgacgcagcgccctcaggttcttcgcgagcaagctcggcgcctacaaaagagcttgtggcgtgagtggccgcccctgccactcgaacgccacaggtgccagcacctgatcaatctgcgcgtctcgccacaactgggccatcgtcttgccggcctcagggtgcatacgctgcggcgccatcatcgacagcggccacaacacaaaggcgtttttcagaatttcggctcgcggtaggaccaagccatcaaaatcgcccaccagatcgccatacaacaacacatcgatatccagcggcaggcctttgcggtctggcgcgtagcggccattgtcagcctcgatggatttcaaacgacgatctaactccatcaacggcaggtcggtataagccgaaaccaccagattgaaaaacggcccacttttgatccccaccggctggctttcgaacaccgccgaacagcgcatatccgtcaagaaacccgccaacgcatccaagccggcacatagacgagcctcgcggtcgatattgctgccaagcccgaggtaaacctgagtcaacgacatccgcgctcgatctccacgcccacgcccttggcagccggtaccgcgccgggcttggtcaacttgaggtgcaaccagggaatctggaattcactcatcagcacttcggccaggcgctcggcaaaggtttccaccaactggtactgggactgctcggcgaaggcctggatacgcgcagacaccctggcgtaatccagtgccagggtcaggtcatcaccggccgcggctgggcgattatcccaggcgaagctaaggtccaggcgcaggcattgccggattccgcgctcccagtcgtaagccccgatcacggtgtcgacttccaggccttcgataaacactctgtccaagcacttttctccgcagcacgacaagggcgcgatgccccgttagaatcagggcgtcctcgcccggaatagttagcatgttttggtcactggcgattctcgcctacctgctcggctcgctgtccttcgccattttgctcagccgcttgacgggaaatcccgatccgcgaatgagtggctcaggcaatgccggggccaccaatatgttgcgcctggccggcaagaaactcgccgtcctgaccttgctgggcgacctgtgcaagggcctgctgcccgtgctgatcgccagcctcgtcggccttagcttgcaacagcaagcctgggtgggcctatgtgccgtcttgggccacctgttcccgttgtacttccgctttcgcggcggcaagggcgtcgccacggcggccggcatgctgctgggcatatacccaccggcggcgttactggccatgctcgcctggctgctgacgttctacctgacccgcaccagctcgctggccgcgctgattgctacgccactgaccctaccgttgctggcctggcaggaaccgcaagcactggtgccgatgagcgtactgacactgctgatcgtctggcgccaccgcggcaatctacgcgacctctttgccgggcgcgaacggcatttttaaataccccgcctgggcccggcgcccttgaaccctacaacggcggcaattgctccatcggccagcgcgcctgcacgctgatcgccaggctttcgtgctgcccggcctgcaagcgctggcaaccggcgtaggcgatcattgcgccgttgtcagtgcagaactcagggcgtgcgtagaacacattgccattcatatcgccgagcattttttccagggaactgcgcaacgccttgttggcgctgacgccgcctgcgatcaccagccgcttcatgcccgcctgtttcagggcgcgcttgcacttgatggtcaaagtctccaccacagcctgctggaacgccagcgcgatgtcgcaacgggcttgttggccgtcgtccccggcgctgacgctctgctgccaggtgttcaaggcagaggttttcaagccgctgaaactgaacatcaagccaggacgatcacacatcggccgcgggaaggtatagcgaccggcaacgccgttctcggccaggcgggcgatttccggaccgccaggataattaagccccatcatcttcgcggttttgtcgaacgcttcgccggcagcatcgtccagcgactcgcctaacagcgtgtattggccgatcccatccacctgaaccagctgcgtatgcccccccgaaaccaacaaagcgacgaacgggaactctggcggtgttttttccagcatgggtgccaataaatggccttccatatggtgcacgccaagggcaggaataccccaggcaaaggccagcgcctgggcgcaagaagccccaactagcagggctccgaccaatccgggccctgccgtgtaggcgatggcatcgatctcggttgccacacagccggcctcatccagcacctggcggatcagcggcagcatgcgcttgacgtgatcgcggctggcaagctccggcaccacgccgccataggcgcgatgcaggtcgatctgactgaacagtgcatcggccaaaagcccgcgttcactgtcgtatagtgcgactccggtttcgtcgcaggaggtttcaagtcccagtactagcatgggtttgcgccttgtagaggctgaattcgaaggcgcgcataatagtcgccactccccctcccgactagcggttttcgatcagaggctttgcattccgggcaatgaggggttaacatccgcaacccttaaaaaccgacgacctcagccgcgaattttttgcgacgagaacgttgattcccggtaatgaaagaaggtagctctggatgccagccgtcaaagtaaaagagaacgaacccttcgacgtagctctgcgtcgtttcaagcgctcctgcgaaaaagccggtgttctggctgaagttcgtagccgcgaattttatgagaagccaacttctgagcgtaagcgcaaagcagcagccgctgttaagcgtcacgctaagaaagttcagcgcgaacagcgccgcgccgttcgtctgtactaatacacagacgttcgtagcaagcttctgccaagcccggccctcagccgggctgttggcatttgcggatatcgcttgatgcttcaccgtcgacgccgcacatgcgaccgagacactgcttcacacgtcagggctggctcttttgccagcggtgcacgtctcttctgacgagcctaacaaggctactgacgagcacacctattcttcaaacagacgatcaaccgtgtcggctgtgcccatcgatgcgtttccgaggccgccattggccaagaccggacgcccgggcaacatttccatgccgaagactgatcagaaactaccctcagtgaatattcggcagatacacttcctgatgacccatgcagacgatgatgatcgagcactccatacgtgcgcttgaacacgtcacgggccctcatttacacgcagtgatgacgagaacgccatggccgggctgattccccagagctttattgacgaccttctgaaccgcaccgacatcgtcgatgttgtcagctcacgcgtacagctgaaaaaagccggcaaaaactacaccgcctgctgcccgttccataaagaaaaaaccccatcgttcagcgtcagccccgacaaacagttttattactgcttcggttgcggcgcgggcgggaatgccctgggcttcctgatggaccacgacaacctggatttcccccaagctgtcgaggacctggcgaaagccgccggcatggaagtgccccgcgaagaaagtggtcgcccgcacaaaccccggcaacccaccgattcgccgctgtatccgctactgaccgccgctgccgacttttaccgccaggcactcaagagccatccgcagcgcaaggccgctgtcgactacctcaaagggcgcggcctcaccggcgaaatcgctcgggacttcggtctcggcttcgccccgccgggctgggacaacctgtataagcacctgagcagcgacaccctccagcaaaaggccatgatcgatgccggcctgctggtggaaaacgccgagaccggcaagcgctatgaccgcttccgcgaccgcgtgatgttcccgatccgcgacagccgtggccgtatcatcgcctttggtggccgcgtgcttggagacgacaagcccaagtacctgaactccccggaaaccccggtattccacaagggccaggaactctacggcctgttcgaagcgcgcaagaacaaccgcaacctcgacgagatcatcgtggttgaaggctatatggacgtgatcgccctggcccaacaaggcctgcgcaacgcggtcgccaccctcggcaccgccaccagcgaagaacatttgaagcgcctgtttcgcgtcgtgcccagcgtgctgttttgcttcgatggcgaccaagctggccgcaacgccgcctggcgcgcgctcgaagccacgctgtcgagcctgcaggatgggcgccgcgctcgcttcctgttcctgcccgaaggcgaagacccggacaccctggtgcgttcggaaggtaccgacgcgttccgtgcacgcatcaatcaacatgggcagccgcttgcggattatttttttcagcaactgaccgaagaggccgacccgcgctccctcgaaggcaaggcccacatggccaccctcgcggcgccgctgatcgacaaggtcccgggcgccaacttgcgcacactgatgcgtcagcgtctgctggagatcactggcttgagcggcgaagccgtgagccagctggtgcacagcgcaccacaggatgcaccgccaacctacgaccccggcatggattacgacgccatgccggactacgctgactttcaccaacctcaggaggccttcgcgccccagcaggaatggacgccgaagaagccgggcgccggcggcaagaagtgggacaaaaagccctggagcaaaaacggcaaacgcggtgatcgcgatgaagcctacgcgccacgcacacccgtagcggtggaagcccccacactgattgcactgcgcacactgattcaccacccgcaattggccggcaaggttgaaagtgccgaccactttgccaacgagagcaacacctacgctcaggtgcttatcgcactgatcgaagccgtgcagaaaaaccctaagctaaactcaattcagttgatggctcgctggcatggcacggaacagggccgtttattgcgggcactggcggaaaaggagtggctaattgacggcgacaaccttgaacaacagtttttagacaccattaataggttatccgcgggtcaacacactcagaccctcgacgaacttatcaagagagcgaggcagccgggattatcggctgaagagcaaattcagatagcaaaacagatgcgcgacctcttaaaacagaatgtttacgcatcaaacccgacctcagctggcgtgtgaggtcatagctcgggtataatcctcggcttgttttttgcccgccaagaccttcagtggatagggtgttatgtccggaaaagcgcaacagcagtctcgtatcaaagagttgatacttcttggtcgtgagcagggttacctgacttacgcggaggtcaacgaccacctgcctgaggatatttcagatcctgagcaggtggaagacatcatccgcatgattaacgacatggggatcaacgtattcgaagtcgcgccagataaggattcccttatgctggccgacgctgataccgacgaggccgccgctgaggaagctgctgccgcgctggctgcagtagagaccgatatcggccgcacgacagacccggtgcgcatgtatatgcgcgaaatgggtaccgtcgagctgctgacacgcgaaggcgaaatcgaaatcgccaagcgtatcgaagagggcatccgcgaagtgatgggcgccattgcgcacttccctggcacggttgaccacattctctccgagtacacccgcgtcaccaccgaaggtggccgcctgtccgacgtcctgagcggttatatcgacccggacgacggcattgcgccgcctgccgccgaagtgccgccgcctgttgatgcgaaagccgcaaaagcggacgacgacaccgacgacgacgaagctgaaagcagcgacgacgaagaagaagccgaaagcggtccagacccggtcatcgctgcccagcgcttcggtgcggtttccgatcaaatggaaatcacccgcaaggccctgaaaaagcacggtcgtggcaacaagcaggcgattgccgagctggtggccctggctgagctgttcatgccgatcaagctggtgcccaagcaattcgaaggcctagttgagcgtgttcgcagcgcccttgagcgtctgcgtgcccaagagcgtgcgatcatgcagctctgtgtgcgtgatgcgcgcatgccgcgtaccgatttcctgcgccagttcccgggcaacgaagttgacgaaagctggagcgacgcactggccaagggcaaggcgaaatacgccgaagccatcggccgcctgcagcccgatatcatccgttgccagcagaagctgaccgcgcttgaaaccgaaaccggcctgacgattgcagaaatcaaagacatcaaccgtcgcatgtcgatcggcgaggccaaggcccgccgcgcgaagaaagagatggttgaagcgaacttgcgtctggtgatctccatcgccaagaagtacaccaaccgtggcctgcaattccttgatctgatccaggaaggcaacatcggcttgatgaaggcggtggacaagttcgaataccgtcgcggctacaagttctcgacttatgccacctggtggatccgtcaggcgatcactcgctcgatcgccgaccaggcccgcaccatccgtattccggtgcacatgatcgagaccatcaacaagctcaaccgtatttcccggcagatgttgcaggaaatgggtcgcgaaccgaccccggaagagctgggcgaacgcatggaaatgcctgaggataaaatccgcaaggtattgaagatcgctaaagagccgatctccatggaaacgccgattggtgatgacgaagactcccatctgggtgacttcatcgaagactcgaccatgcagtcgccaatcgatgtcgccactgttgagagcttgaaagaagcgactcgcgacgtactgtccggcctcactgcccgtgaagccaaggtactgcgcatgcgtttcggcatcgacatgaataccgaccacacccttgaggaagtcggtaagcagtttgacgtgacccgtgagcggatccgtcagatcgaagccaaggcgctgcgcaagttgcgccacccgacgcgaagcgagcatctgcgctccttcctcgacgagtgataccagaacccccggcccaggccgggggttttgctttctaccgaccgctttccacagattaactgccccgcaccaccccgccctcgcaatgcccgtctacactcgagacattccccgtgccataacgagaccgttatgcccagattgccgaccgtgatactgctgtcgctgctgacctggaccgcaacggctggcgcgttgactcttacggatgatgagcgtagctggttggcggaccatcaggagctgcgcctaggcgtggatgcgtcttggccaccttttgaatatcgcgatgaaaatggccgatatcagggcttggctgccgattacgtacgcctactccaggaccgtctgggcgttcgaatcaaactgatcgaacccgttaactggaccgcggtgcttgaacaagcccgcaataatcagctcgacctgctgcctggcatcatgtccacccccgaacgccaaaacttcctggccttcacacgcccctatctcgactttcccatcgtcatcctggcccatgaaggcggcgcgaaaccacgcagcctcaaggatttgtacggcctgaaaattgccgtggtggaaaactacgcgccccatgaactgctgcgtacccaccatccggacctgaatttggtggcgatgcccaacgtcagttcgacgctgcaagccctggccaccgatgaagtggatgccgtggtcggcgacctcgcctccagcgtctggagcctgcgccaactcaagctcgacggcctgtacgtcagcggcgaaacaccctatcgctaccaactggcgatgggcgtaccgcgggatgagaaaatcctggtgggcatcctggacaaagtcctcgccgacctcagctcagccgaaacggatgcgatccagcaacactgggtcggcagcttcaccgatcaccgcaccttctgggctgacttgctcacgtacggcctgccagcggtgctgctattgagtacggtgctggcaatcgtgattcggatcaatcgccggctcagctcggaaatttcccgccgggtcgcccttgagcaagaactgcgaagcagcgaataccactatcgcggcctggtggagagcttgtccgccatcgcctgggaagcaagcatcagcgatttcacctacagctatgtgtcgccccatgccgaagacctgctcggttatccccgcgcccattggctgattccaggcttctggcgcaacatcatccaccccgccgacctgacccgcgccgaggcctattgctatcgggaaactcgcgctaaccgtgatcacagcattgattaccgggtcatcaccgctgatggccgctgtctgtgggtacgtgacattgtcagcctgatcgaacacggccacgagccagtgctgcgcggcctgatgatcgacatcagcgaagccaagcgcaccgaggaagccctgcaactgtccgagcagaaatttgcctcggtgtttcagcagtgcccagacatcctggtgattgcccagttgtctgatggctgcctgctggaggtcaacaaggcattcgaggaccagattgggctgcgcgccgacgaggtggtaggcaaaaccgcctcagatctgaatatatggggcattcagggcgtcggtccggatttgctgcagcgggtacagaccaccagtatccgtaacctggaaatgtcctttctgcgcagcaatggtcaggcatttaccgggctgatctcagctgagccgttccaactcgataccactgaagccctggtggtggtggtgcgcgatatcaccgagctcaaggaaacccaacagcagctgcaaacctccgaagagaaattcgccaaggcattccatgcttcccccgacggtttactactgagtcgccaaagagatggcctgctgattgaagtgaacgaaggtttcagccacctgaccggtttcaccagcgcctcctcacttgaccaatcaaccctggacctaggcatctgggtcgacctcaacgaacgcaaacacatgctggagttgatgcagcgcgacggttttgtgcgcgatttcatctgtcatatccgtcgtgccgacggccagattcgcctgtgcgaagtgtccagccgcccactgccgattggcgacgaagattgcatgctgaccatcgcccgggacatcaccgaacgccagttgatgcaggaaaaactgcagcaggccgccacggtgttcgaaagcaccgccgaaggcgtcttgatcaccgacacacggcagaacatcagcgccgtcaaccgcgccttcactgagataaccggctacagcgaggttgaagcccttggtcataccccgcgcctgctcgcctccggcctgcatgacagcgcgttctatgcggcgatgtggcaccagttgacggcccacggtcattggcaaggagagatctccaaccgccgcaagaacggcgaggtgtatccgagctggctgaccatcagcgccgtgcgtaaccgcgagcaattggtcacgcacttcgttgccgtgttcgccgacatctccagcctcaagctggcccaggcacgcctggattatcaggcccaccacgacccattgaccggcctgcccaaccgcaccctgtttgaaaaccggttgcaggccgccctcaacggccagcaggaaagtggtaaacagggcgcggtgttgtttctcgaccttgatcgcttcaaacacatcaacgacagcctcggccacccggtcggcgacctgctgctcaaagacatcgccgtacgcctcaaggagcagttgcgggacgtggacaccgttgctcgcttgggcggcgacgaattcattatcctgttgcccggcttgcaacaggccagcgacgcccagcacttggcgaacaaactgctcgactgttttaccccgccattccaagccggcgagcatgagttttttatcagcgccagtatcggcaccagcctgtatccgcaagacggtaccgacgtcgccaccctggtcaaaaatgccgacgccgcaatgtatcgctccaaggccaaggggcgtaaccgggtcgagcgctatacccgcgacctgactgcccaagccaatgaacgcgtagcgctggagcacgaactgcgccgcgccatcgagcgtgaagaattgagcctgtattaccaacccaaacgcagcctggtcacccagcaactgatcggcgccgaagccttgatccgctggcatcacccgactctgggcgaggtcccgcccgagcactttattgccctggccgaagagaacggcatgatcctgcaaatcggcgactgggtactggaacaggcctgccgacagctgcacgcctggcaaacggctttcgaggacttcggccccctgtcggtcaacctcgcaggcgcgcaactgcgtcaccccaacctgctgtcacgtatcgaacaactgctgcgcgattaccgcctcgaacccggctgcctgcaactggaaatcaccgaaaacttcatcatgagccaagccgaagaagcactggcggtgttgcaccaactcaagcgcctaggcgtccaattggcgatcgatgatttcggcaccggctactcgtccctcagctacctcaaacgcctgcccctggacttcctcaaaatcgaccaatccttcgtgcgcggcttgcccgacgaccctcacgatgcagccatcgtgcgcgccatcatcgccctcggccacagcatgcaattcaccatcatcgccgaaggcgtggagactccggcgcaacaagcattcctcgcaagcgaggggtgtgaacagatgcaaggctacatcgtcagcctgcccctcccgccggagctttttgccgccagcttccttcgtacacggcacaaggatttttcggatggcacagtgaacaaaccatcgctataatccgcgacctactgagggcctatagctcagttggttagagcaggggactcataatcccttggtcgtaggttcgagtcctactgggcccaccacacaaaaaaagccgcgcattgcgcggcttttgcgtatctggcatcacggttctttcagccaggccaagcctgtaccatgcttgctcattgcccccgcactggagccccccccttgcccgccctagacgaaatcgaccgccaactgatcgccgccctgcagctcaacgcccgtgaaagcgtggccatgctcgccaggcagttgggcatcgcgcgcaccaccgtcacgtcgcgtctggcccgcctggagaaaacccaggtcatcaccggttacggcgtgcgcctgggccagcgcgttgcggatggggggttgcatgcttatgtgggcattaccgtgcaaccccgttcgggcaaagaggtgttgcgcaggctgagcaccatggcgcaagtgcagcagttgtgcgcggtaagtggagagttcgattacgtggcttggctgcgcaccgattcgccagagcaactggaccaattgctggaccagatcggcagtgttgacggcgtggaaaaaaccaccacctcgatcatcctcagtaacaaattggatcgcggacaaccaatctgatcactacctgcgtcatattgactaaaaccagcgcaatacgacgacacattgcgtcttattaacgagcgcaacgctccctaaactggctgccatcttttcctatactcaacgggccctcctcccgccgagccgtcagtaaggtcagccatgagcattccgtccagcaccctcagcaagcctaatcgccacccgggcgacggcaagaaacccatcactatcttcggcccggatttcccgtttgcctttgatgactggatcgaacaccccgccgggctgggcagtattcctgcggttaatcacggcgccgaagtggcaattgtgggagccgggatcgcgggcctggttgcggcctacgagctgatgaagctcgggctcaagcccgttgtgtatgaagcctcgaagatgggtggccgcttgcgctcgcaggcctttgaaggcgccgaaggcatcatcgccgagctgggcggcatgcggttcccggtgtcgtccaccgcgttctaccattacgtggacaagctgggactggagaccaagccctttcccaacccgctgacaccggcgtccggcagcaccgtgatcgatctggaaggccagacccactacgcgcaaaaactcgccgatttacctgcactgttccaggaagtggccgatgcctgggccgacgccctggaagccggttcacagttcggcgatatccagcaggcaatccgcgaccgcgacgtgccacggctcaaggaactgtggaacaagctcgtgccgctgtgggatgaccgtaccttctacgacttcgtcgccacctccaaggccttcgccaagttgtcgttccaccaccgtgaggtgtttggccaggtcggtttcggcaccggcggctgggactcggacttccccaactcgatgctggaaatcttccgcgtggtgatgaccaactgcgatgatcatcaacacctgatcgtcggtggcgtggcccaagtgcccatgggcatctggcgccatgtgccggaacgctgcgcccactggccggccggtaccagcctgagctcgctgcatagaggtgcgccacgggccggcgtgaagcgcattgcccacgccgccgatggccgtttcgccgttaccgacaactacggcgacacccgtgaatacgcggcggtgctgaccacctgccaaagctggctgctgaccacccagatcgaatgcgacgaaaccctgttctcgcaaaaaatgtggatggccctggaccgcactcgctacatgcagtcatcgaaaaccttcgtgatggttgaccgcccattctggaaagacaaagacccgcaaactggtcgcgacttgatgagcatgaccctcaccgaccgcctgacccgaggcacctacctgttcgataacggtgacgacaagccgggggtgatctgcctgtcctactcgtggatgagcgatgcgctgaagatgctgccccagcccatcgacaagcgggtgaaactggccctcgatgcactgaagaagatctaccccaaggtcgacatcaaggcgcgcatcatcggcgacccgatcaccgtgtcctgggaagccgacccgcatttcctcggggctttcaaaggtgccttgcccggtcactatcgctataaccagcggatgtatgcgcacttcatgcaaaaggatatgcccgccgaacaacgcgggatcttcatcgcgggtgatgatgtatcgtggacgcccgcctgggtcgaaggcgcggtacaaacctcgctcaacgcggtgtggggcatcatgaaccacttcggtggcagcacccacccgcagaacccaggcccgggcgacgtgttcgatgaaattgggcccatcgccctggcagaataaggagttgagcatgcgtgtcgccttgtaccaatgcccgccgctgccgctggatgtggccgctaacctgcagcgcctgcaccagttggcccatgaagcacacggcgccgatgtgctggtgctgccagagatgtttctcagcggctataacattggcgccgaagccgttagcgcactggccgaggcacaggacgggccgtcggcgcaggcaattgccgaactggcgcaaggtgccgggctggcgattctgtatggctacccggagcgggccgaggacggccagatctacaacgccgtgcagttgattgacgcccacggcaagcgcctgtgcaactaccgtaagacccacctgtttggcgaccttgaccactcgatgttcagcgccggccccgatgatttcccggtggtggagttgaacgggtggaaggtgggcatgctgatttgctacgacctggaatttccggaaaacacccggcgcctggccctggccggtgccgaactgatcctggtgcccaccgccaatatggtgccgttcgactttgttgccgacgtcaccgtgcgggcgcgagcctttgaaaaccagtgttttgtggcctatgccaactactgcggccacgaagacgagattcactactgcgggcaaagcagcattgccgcgccggacggccagcgaattgcccaggccggcctggatgaagccttgatcgtcggcaccctggagcgccaatcgatcttcgatgcccgcgccgccaaccactacctacaagaccgtcgcgccgaactctacggcgcgctgcacaagccctgacccattgggtttgctagcataggcacttcccacgcctcggaagtgcccatgcctgcgccggttcaccctcatcccgttcacctgaccctcgccaatggcctgcgggtctgcctgcgccatgcgccacgcttgaagcgctgcgccgccgttttacaggtggctgccggcagccatgacgtgccattggcttggcctgggctggcgcattttcttgagcacttgctgtttctcggtaccgagcgctttccagccggcgaagggctgatggcctacgtgcaacgacacggtgggcaggtcaatgccagcacccgtgagcgcaccaccgagtttttctttgaactgccggtgccggtttttacagacgggctgatgcggttggcggatatgctgactcacccacgcctggccctcgacgatcaacagcgtgagcgcgaagtgctcgacgcggagttcatcgcctggtcccaggatgccaaggcccaacaacaagtggcgctgctgcaaggcttggcagcagatcatccgttgcgcggttttcatgccggcaaccgcgacagcctgccggtggaaagcgaggcctttcagcaagccttgcgcgggttccacgcacacttttatcaaagcgggcagatgactttgagccttgccggcccacaatcgctgaccgacctgcaggccatggcccagcagttcagtgaccaactgacacccgggccattgcacccgcaggccgctccaccggccttgatgcaaggctccgcacgctgctatcaacacgccgccgatcgccacctgcatcaggtcattacctgtgacgcaccacgggaagcgttggcgtttctctgcacctggctcaacgcctcggcccccggcgggttgctcgccgaactgcaagctcgacgactggccaccgcgctgcaggcgtccgtgctgtaccagtttgcggatcaagccgtgctggatatccacttcactctcggcagcgagcgcgaaccggccacgcagatcgaagagttactgcacgactggctgagcttcttcgcacacagcgactggacagcgttacgcgaagaattcgccttgctcaatgctcgccagcaacaggtccaaggcgccctggccttggcgcgcaacgacgcccacgatctgtcggaacaaggcgccgctgccctcaaggccatgctcgattcactgcacctgcccgcctcccggcacccttggcaactgccgcctaacaatcctttgcttcgtgcgcccgccaaggaagaacgcgccggcctgattcgcggccaaaccagcgcccatcgtggcttgcgtacctttgcccaggatcgctcacggggccgacgggagctgtcggcgctgaccttcagccaggcgttggcggatgacacgggcgaaggtgcgctgtacctgcactggcggtttgactcggcggtacccaccgggctggaaagcctgttgcggccgttgtgcgaacaggcacggcaggcgggcgtcgagttgtcttgcgaaacgatcgccactgactggcaggtgaagatgcacggcctccacgagcccatgccggcggtgctcgaagcgttggcgcggtgcctgagtggctcggatgaaccgtcgcccgctcccgcgccgatgatcgccatccgggaactgctcaaggcgttgcctacttgctgtgccggtgttcaacccgagcctcaggggacgacagcgtcctgggccacagcacgctggcaggggctggtcacaggcttgcccgccagctgtgaagcggcgatcaaagccgcagcggcccggttgcctgggcaaccggcaactctgcctttcacacctcaggcccttgacggacaaaagcgctggcacgcagtcaacaccgaatccagcgaggcggcgctactgctattttgcccaacgcctgcgcaaaccctcgccgatgaagccaactggcggttactcgggcacgtgctgcaagggccgttctaccagcgcttgagagtcgaactgcaaatcggctacgccgtgttcagtggcatccgacaaatcaacggccaaaccggcctgctgtttggggtgcaatcgcccagcacttccctggacggcatcgtcgaacagttgcaggccttcctcgaacaactgccgtcgttgatcgagcgctgccccgacttgggtaaccaggcccttgcgcagcagttcgcggcccaggcgctacccgtcaaccaggctgccgagttgctctggcatgcgcacttggcaggtcattcgtcgcgttatctggatcagcttcaacagttgattcaacagcgcacacgcgaggatgtgcagcacgccgcgcagcaactcaatgacgccgcaggcggctggcaatgcgtggccaacgggcggtgtatcaacgacgactggcaagcggcgtcgtgatcattgccaaccctgcaacaggctttctccaccgagacagcgctaacttgaataaaattgcgtaacattgcgcagcaatatctgaacatctccaatgggaggtggactatatgtattacttggtagtgaacgtcccatcccttgataggagtaagaatatgacctggtccaaacctgcttacactgatctgcgtatcggtttcgaagtcaccatgtacttcgccagccgttgattggctgagtaatacaacgcctcggttcgcccggggcgtttttgttttgagctgtgcttgagggagcgatcatgtttgtccagattctaggttccgccgccggcggtggcttcccgcagtggaactgcaactgcgtgaactgcgcaggttttcgtaatggcagcctgcgggcccacgcgcgtacccagtcgtccatcgcgatctccgacgatggcgtgaactgggtgctctgcaatgcatcgccggatatccgcgcgcagctccagggctttgcgcccatgcaaccgggccgcgccctgcgcgataccggcatcagcgcaatcatcctgatggacagccagatcgaccacaccactggcctgctgagcctgcgcgaaggctgcccacaccaggtgtggtgcaccgacatggtccatgaagacctgagcaccggcttcccattgttcaccatgctgacccactggaacggtggcctggcctggaaccgcatcgagctggacgccagcttcaccatcccggcctgccccaacctgcgcttcaccccgctgccgttgcgtagcgccgcaccgccctattcgccacatcgtttcgacccgcaccccggtgacaacattggcctgatcgtcgaagacctgcgcaccggcggcaaattgttctacgccccgggcctgggcaaggtcgacgcaccgttgctggagatcatggccggcagcgactgcctgctggtcgacggcacgatgtgggacgacgatgaaatgcagcgccgtggcgtcggcacccgcaccgggcgtgagatgggccacctggcacagaacggccccggcggcatgcttgaagtgctggagcaactgcccaaacagcgcaaagtgcttatccacatcaacaacaccaacccgatcctcgatgaagactctcccgagcgagcggagctgatgcggcgcaatgtcgaagtggcttacgacggcatgagcattgaattgtaggagcattcgaaatgaccgacacaccgttgagcaaggcggagttcgaagccgccttgcgcgccaagggcgccttctaccatatccatcacccctatcatgtggcgatgtacgaaggccgcgccagccgtgagcagatccagggctgggtcgccaatcgcttctactatcaggtgaatatcccgctgaaagacgcggcgatcctggccaactgcccagaccgtgaaatccgtcgcgaatggatccagcgcctgctcgaccacgacggcgcgcccggtgaagacggcggtatcgaagcctggctgcgcctgggccaggctgtgggcctggaccccgaccaactgcgctcccaagagttggtgctgcccggcgtacgcttcgccgtggacgcctatgtcaacttcgcccgccgcgccagctggcaagaagccgccagcagctcgttgaccgagctgttcgcgccgcaaatccaccagtcgcgtctcgacagttggccccagcattacccgtggatcgacccggccggttacgagtacttccgcacacgcctgggccaggcccgtcgcgatgtggaacacggcttggcgatcaccctgcagcactacaccacccgcgaggggcaggagcgcatgctggaaattctccagttcaaactggacatcctgtggagcatgctggacgccatgagcatggcctacgaactcaaacgcccgccgtatcacagcgtcaccgaacagcgggtatggcataaagggatcaccctatgagctttgatcgcagtaaaaaaccgacctggcgccagggctatcgctaccagtacgagcctgcacaaaaaggccatgttctgctctaccccgaaggcatgatcaagctcaacgatagcgccgcattgatcggcggcctgatcgacggcgagcgcgacgtggcggccatcattgccgagctggacaagcagttccccggcgtaccggagctgggtgacgacatcgagcaattcatggaggtcgcccgtgctgagcactggatcacccttgcctgaaaaaccagccatcggcctgcctctgtggctgctggccgagctgacctatcgctgcccgctgcagtgcccgtattgctccaacccgctggatttcgccgagcagggcaaagagctgagcaccgaacaatggatcaaggtatttcgcgaagcccgtgaaatgggcgcggcgcagttggggttttccggcggcgagccgctggtgcgccaggacctggccgaactgatcggcgaggcccgcaagctgggtttctacaccaacctgatcacctctggcatcggcctcaccgaacaaaaaatcagcgacttcaagaaagccggcctggaccatatccagatcagcttccaggccagtgacgaacaggtgaacaacctgctggccggctccaaaaaagccttcgcgcaaaaactggaaatggcccgagcggtgaaagcccacggctacccgatggtgctgaacttcgtcacccatcggcacaatatcgacaagatcgaccgcatcatcgaactgtgcattgcgctggaagcggacttcgtcgaactcgccacctgccagttctacggctgggcacagctcaatcgcgtgggtttgctgcccacccgcgagcagttggtgcgcgccgaacgcatcaccaatgaataccgcgccaagctggaagccgaaggccacccctgcaagctgatcttcgtgacaccggattattacgaggagcgccccaaagcctgcatgaacggctggggcagcatcttcctgaccgtcacgcctgacggcaccgccctgccttgtcacggcgcaaggcagatgcccgtgcagtttcccaatgtgcgcgaccacagcatgcagcacatctggtacgactcgtttggcttcaatcgctttcgtggctacgactggatgcccgagccatgccgttcatgcgacgaaaaagaaaaggacttcggcggctgccgttgccaggccttcatgctcaccggtgacgccagcaatgccgacccggtatgcagcaaatccgagcagcacggcatcatccttcaggcgcgggaagaggccgaacgggccacccagaccatcgagcaactggcctttcgcaatgagcgcaactcacggctcattgcaaaaggctgagggcctcaacgcttggcgatgatgtacaccgcgtggatgatgccagggaagtaaccgcacagggtcagcaggatattcagccagaaggcaccgccgaaacctacttgcaggaacacacccaatggcggcagcagaatggcgatgatgatacgaatgatgtccatgggtcagctccagaaaatcggctcgtgtgagccgtgtagctaatcgaccttggcggttcgtgagggttcagtggattctggcattgggccatctcaggccagaatctccagcccatgtttttgcacgatgctcaataacttgagcgccatgccactgggccgtttctctcccgactcccattttttgaccgtggacgcgctggtgttcaggtagcgggcgaatacaggctggctgacatggctgctttcccgtagttgcttgatctgttcggcagggatttggtctggcatggataaacatgcctcatcatattctcgcaaagtggttttgctgatggcgccgacagcatgaagcgctttggctgactcgtgaatggactcaaacgcctcgcttttatacttcttcgtcatgatgtatctccacaaactccttgagatccagcatttgctgaatctgtgcttcgtttaacctttcataagttttggccagtgatcgaaaccaaacaagttcgctctgcgtaatgttgccttgatccttcttcgcgaacagcaactgataaacccaatagtgcctacccttggccaatatgattgaacgatgtcgattttgattgaggcgttttttccagacaccaccgcccagattatctgcctgccccctcagcatttcgccaaacgcctccctcaactccgaatcgcagatccaggctttgttggccgcctcggcaaatcgccgtgttttaaacaacctgagcttcatggaggtcccttcccaaaaacataccacccagtggtatagattaaaagtcgagcacgctgtgccccatcggcggtccttgccgacgtccgctaagaaaccactgttcccagggaggctcaatcaacgttttcacaccagaaattacccagacaaaaaaacgcccccagccaaaagaatcaggctggaggcgccgcgtatgccgcgagacggttcaggaaactggggtcaaacggcgatgcccttgcggcattgcacttgagcggtgcgcacccgagaaaaggcgcgggcaagccgcagcagcatttcgtcgatgtgggttttgctgatgttcagcgcaggggtaaagcgcaggcagtcaggttgtgaggcggtgagaatcaggccttcgtgcagcgcggccttgaccactgctgcggcgcaatcgtccgacagtgtcaagccccaaagcagcccgttgccgcgcaagggcccatggtcgtaacggtaggccaggcgggcaaggccttctgccaggtacaagccggattcgcgcagatgctcgagaaagccgttcgccaatacagcgtcgagtaccgcgatacccgcagatgccatcagcgcattgccatgatgcgtaccgtccaactcgcctggttcgaagcaacaggcagtaccacgcgccagcagcgccgccaggggcacgccaccgcccaggcctttgcccagggcaatgatgtcggcgcgcacgccgtattgttgttcggccagcaagctgccacagcggcccacaccggtttgcacttcgtcgaagatcagcaggatccccagctcacgacacaggcgttcgacgcccttgaggtaatgttcggtcgcggggatgacaccgccgccgctttgtatcggctccagcatgatagcgacggtctgcgcatccaccgctgcatgcagggccggtagatcgttgaacggcacctggctgaaacctggcaactgcggttcgaaacggttttcgcaggccacatccgacgccgacatcgcccccaagctacggccatgacagccgttgcttacggtgatgatgtggtaagcgcccccgcgatgcagttggccccacttgcgtgccaacttgatggccgcttcacaggcttccgcaccgctgttgagcaagtaggcctggtcgctgccggtgtggtggcacagacggtcgacgaggtccagttgcgcgcggttgtgcaagcccaggccggggttgatcacggtgagcatctgttcggcaatggcgtcgcgcacggcctggggactgtggcccaggctgttggcgccgccgccttgactgaaatccagataggcgcggtcgtcagcgtccgaaagccaggagccgtgcccctgcacaaatacgtggggcgggcgcgccacagtgggcatcaggcactggctggaaacctctgcacgcggggcatgcacaaccaggtcatccagactcggcgcagagcgacggaacaagttcacacttcacctccgttggcaacctgaccttggtcgatgccgcctgccaataaggccttcagattttttgcgttgcctatgtaaacgctatcaacaaaaacgctgttcattgtccgatccggccctgtaagccctgcgaataggcgctagactaggcgcctcgggggccagcggccatttcgattttccagctttttcgataagcaaaccttatggatttcaagcaactgcgttatttcgtcgcggtgtatgaggaaggccacgtaggccgtgccgcggagcgtctgtccatctcccagccagcgctgtcgcaacagattcgccaactggaacagaacctcgacgtcagcctgttcgaacgcagcagcaagcgcctgttgccgaccctggcggcccacaccttatacaaccacgcattgccgctgattgatggcatgcagcaagccgtggaggcgctgcgcaatttcaagggccaagccatgcgcaccctggccatcggcgtgctgcaaaccgtgcacaccagcctggtgccacagatgcttgagcgcgtgcgcaaagcccagccccatctggtggtgcagatctacgagctgaccgggcttgagattgaacggcggttgctcaatggctccctcgatatcggcatcagctacctgccaccccgtcaaccgggcctgcatggcgtgctgctgtatgaagacgagttgaaagtggtgattcccgaagaccatccgttgcgcgagttcaagaaagtctcgctcaaacaagccgccgagttaccgatgttgctgttgggggaagagtttcaggttcggcagatctggcaaggccaactgtccaacctcgggcggcgtccgcaagtgcaggcggagctcaataccatggtgggcattctcgacagcctgcctcacacccggctggcgacggtgctgcctgggcgctcccaggacgagcacaacagcaaggcactgctgtggaaacccttgagcgagcccagggtaccgctgaaagtcgggttggtatgccgcgatgtgcaacgccagcaggcgacggtggcgttattgcgaaccctgctggaagacgtaatgaatgccccgtcggcaagcgcctgactttttcgcgggcaaaagaaaaccccgccgaagcggggctttgcagactgtttccctgacatccatttcactccgccatcctggcagaatcctacgtgtccgtgttgttgctttgcgcttcctgcgcgacgtccatgtgaagtagattagccgtggatccaatgtggcgatagaggacgattagcagcacgtcatgtaagagaatgcttacacgccctccgcgcccttaaaacagggcttcatccatcaggaacagtgattcgctaccggcttttaccgacgcactcaacgagtggatacgcggcaacagacgggcaaagtagaaacgcgcagtccccagtttgctggcgtagaaatcctcttcgccctctttacccaacgccgccttggccatgcgcgcccacatataggcataggccatgtagccgaacgcatgcagatattccaccgaggccgcgccgatttcattggcgtcgctcttggcgcggtccagcacccaggccgtcagctcatccaggttatccacagccgcactcagcggcgtggtgaactcggccaaatcagggcccgatgcggcgatgaactggcggatctcatcggcgaacaaggtatagaacgcaccgccgctgccgacgatcttgcgacccatcaggtccagggcctgaatgccgttggtgccttcgtagatctgggtgatgcgcacgtcacgcaccaattgctcctggccccactcgcggatgtaaccgtggccgccaaacacctgctggccaagcacggtggtttccaggcccaggtcagtaaggaacgccttggccaccggcgtcagcaacgccaccaggttatcggcacgctcgcgcgcctgggcatcgtcgctgaacttggcgatgtccaactgcgtcgccacgtaggtggagaacgcccggccgccttcgttcgccgccttcatggtcagcaacatgcgacggacatccggatgcacgatgatcgggtctgccggcttgtccttggcctgcgcgcctagcggggaacggctctgcagacggtcgcgggcatattcaatcgcgttctgataggaccgctcacccgacgccaggccctgaatgccaacacccaggcgctcatagttcatcatggtgaacatcgccgccaagccccggttgggctcaccgaccaggtaacccacggcttcgtcgaagttcatcacacaggtagcggaggcctggatgcccatcttgtgttcaatggagccgcaattcaccgggttacgcgcgcccaggctgccatcggcatttaccaggaacttcggtaccaggaacagcgagatgcccttgggcccggccggtgcgtccggcagtttggccagcaccaggtggatgatattttcggtgaggtcgtgctcgccaccggtgatgaagatcttggtgccgctgaccttgtaggagccgtccgcctgaggctcggccttggtgcggatcatccccaggtcggtaccggcatgggcttccgtcaggcacatggaaccggcccactcaccggaatacatcttcggcaggtaggtggccttgagttcatcactggcgtgagtgttgatggagacacaagcgccggaggtcaacatcgggtacaggccgaaagccaggctcgatgagttgatcatttcttcaacctgcgccgacacggccttgggcatgcccatgccgccgtaggtcgggtcgccgcccacccccacccagccgccttcggcgtaggtgctgtaggcttgagggaaaccgtcgggcgtcgtgacggcgccgtctgcccactggcagccttgctcatcgccgccgcggctgagtggggcaatggatttggcggtgaccttgccggcctcctccaggatcgcctcgacagtttcggcgtcaacgctgtctgccaatgccggtaactgggcccaagtattagcgacctcaaaaacttcgttgaggacgaagcgcatatcacgcaacggcgctttgtaatcagccatggcaaacctcgtgagaacgtgaaaaatgattcgataggatcggttttacaggcgtcgagtgtacccgaacaacttttcagacacatagggtccattcgtgaccattaagtatttataagtcacatacaaaccattgtgtggcgggcttgctcgcgaatgcggcgtgtcagtcgctacatctttgactgtaccagcgcattcgcgagcaagctcgctcccacattttgaccccgagcaatcagtgacctctacagtgcaaaggcctgcgccggtaagctcatcaggcattcgctccccgcctccaccgcagcacggtgcatggccgtacgcggcaacaggcgcttgaaataaaagtcgcaggtcgcaagcttcgcctgggcaaaccctgggtcatcctgggcttgcgccgcgatcgccatgcgcaaccacaggtaggcaaggatgatgtaaccgctgtacatcaggtaatccatggccgccgcgcccacttcgtcagggtttttcatcgctgccgtgccgaccttcagggtcagttcgccccattgctggttcagctcattgagttgcgccacatgggccttgaactgcgcatgctcggcattggccgcgcagaacttatgcacaattttggtaaacccacgcagcaacttgccctggctgcccaataccttgcgcccgagcaggtccagagcctggatgccgttggtgccttcatagatcggggcgatacgtgcgtcacgggccagttgctccatgccccactcacgaatatagccatggccaccgaatacctgcatgccgtggttggtcacctccaggccggtttcggtcatgaaggctttgcagatcggcgtgaggaaggccaacaggtcctcggcttcctggcgttggccggcgtcgctgcccaggtgcgcggtgtcgagcagttgcgcggtgaaataggtcaaggcgcggttgccttcgttgaaggctttcatggtcagcaacatgcggcggacatcggcgtgcacgatgatcgggtcggcggctttctccggggccttggcaccggtcagcgagcgcatctgcaaacggtcattggcgtacttgatcgcgccctggaagctcgcctcgccgttgcacaggccctgcatgccggtgcccaggcgtgcgtggttcatcatggtgaacatgcagttgaggcccttgttcgcctcgccaatcaaaaagcctttggcgccatcgaagttcagcacgcaggtggccgaagccttgatacccatcttgtgttcgatagagccgcagtgcaccgcattgcgctcgccggagtcggcatggaacttgggcacgataaacaatgagatgcccttggtgcccgccggcgcatccggcagtttggccagcaccaggtggatgatattggcgctcatgtcgtgctcgccggccgagatgaagatcttgctgccggtgaccgcgtaactgccgtccgcctgtggcacggcgcgggtcttgatcaagcccaggtcggtgccgcagtgggcttcggtcaggcacatggtgccggtccattcgccggcggtgagtttgctcaggtaggtggctttctgttcgtcggtgccgtgggcatggatggccgacatcgcgccgtgggtcaggcctgggtacatgccccaggaagtgttgctggagccgatcatctcgctcagcaccaggcccagggaatggggcaggccctggccaccgtaggccgggtctgccgccacgccatgccagccgccttccacatactgggcgaaggcttgcttgaagcctttaggcgtggttaccacgccattatcgaaatggcagccctcttcatcgccgctgcgattgagcggcgcgagtacgttttcgcagaatttggcgccttcttcgaggatcgcactgaccatgtccgggctggcatccgtggcacccagggccgcgtagtggccgtggaaatcgaatacggtgtcgatcagaaagcgcatgtcgcgcaggggagctttgtactcaggcatggcaatgtctccggcagcagatagggttaacctactgccggccatggccgtggacaatcactgtagcgctgctgaatacagcgccattactcaactggcagcgctttgcatgcgcaccgcgccacggcgggtttgcccggctgcgactacacaattacgccccgcccccttggcggcgtacagcgcctggtcggcggatttgagcacctcgtcggggctgcgctgctcggcctggcgctcggccacgccgatgcttaccgtcaccgacacactggatgctccgctgcccgcacggcgttggcggccttgatggtcgtcctgggggcggtccgggttgcgcaacttgatgtcgtagctggcgatgatctcgcggatctcctccaggtgcggcatgcactcatccaaggtcttgccggcaaacaccacggcaaactcttcaccgccgtaacggtaggcccgcccaccaccgttgaccttggacagcttgctcgccaccaggcgcagcacctggtcgccgacgtcgtggccgtgggtgtcattgaaacgcttgaagtgatcgacgtcgctcatcgccagcacatagttacgccccagccgctgcatgcgctcgttgagcgcacgtcgccccggcaagccggtgagctcatcacggaacgccatctgatacgcctcgtgcgccacccccgcagcgatcatcaacatcacctggctgcacatgatgttgagggtgaacggcaggatgaaggtttgcggcaacatccagaacatgcccagcaaccccaccagttgcgcggcgtgcagcgggcgcggctggtaccagtattgggcggccagggtgagaaaaccgatcaggaacatcgggtacgagagctggatcaggctcatccacgcgccgtgcagcatcggccagcgaatctccgccaaccagcccagcaaggcctggggaaaactctgcttcagggccagcgccacactgcccaccgccagcagcaccgcgcagcgggcgacgaagtcacggaacagatgggttttttcctgccacagcgcatagatgctgaacagcaagggcaacagcaggcaacacaggtggaacaccaccgcagcgtcttcacgcacgcggccgttgtcgcggtagaagtcggtctgggtatccagcaggaaataggcgacgtacaccgtgaccatcaggaacagttcacgctggcgtcgatacaccgcgcaataggcgccgccaagcaacaggaccagggtgggcaacacgttgaacagcgaggtgaagaagacgctgaggtccttgacgtacgcagccgagagcccggccagcaacagcagcagcgaagggagaaaatggctgaaacgtacagcggacacgcgtgacaagggtaaaactccgacccgcaaacaaataatggcactgtgcctctaagcggtcagttaagcacaactgaccgatcatgtatcacattgccatcactgtaacggcagctcaccgcaatccctgagtgcgttactgcggttttttatgcgcgccttctgtaggagcgagcttgctcgcgaagatcccataggcaccgcgcttatccagaatgcccgcgttatcgttaacgaccttcgcgagcaagctcgctcctacacaagggcaaaaaaaaccgccgcttcccgaaggaggcggcggtttttagaagaaccgggtaaggcttagtaagccagaccgaagtcttcttctttcatgtccatcaggttgttggcgcccgacagcatggttgccacgtgggtgcgggtacgcggcaggatgcgttggaagtagaagcgcgcagtctgcaatttcgcggtgtagaacgcctcttcgctggtgccggcggccagtttctcggcagccaggcgtgccatgtcggcccagaaataagccaggcacgcgtagccggagtacatcaggtagtccaccgaagcagcaccgacttcttcacggtctttcatcgcggccataccgaccttcatggtcaactcgccccactctttgttcaatgccgccagcggtgccacgaactcgttaaccgcttcgttgccttcgttggcctggcagaacttgtgcacgatcttggtgaagcccttgagcgcttcgccttgggtcatcagcactttacggccgagcaggtccagcgcctggatgccggtggtgccttcgtacagcatcgaaatgcggctgtcgcgcacgttctgctccatgccccactcagcgataaagccgtggccaccgtagatctgcacgccgtggttggccgattcaaacccgacttcggtcatgaacgccttggcgatcggggtcatgaaggccaacagggcatcggcctgcttcttggcttcgtcgtcggtgccgtacttgacgatgtccacttgcttggcggtgaagtacaccattgcacggttaccttcggcgaaggctttcatggtcagcagcatgcggcgtacgtcagggtgcacgatgatcgggtcagcggctttatccggtgctttcgggccggtcagggagcgcatttgcaggcggtcacgcgcatatttcaagccgccctggaagccgatctcggcgtgggccaggccttgcagcgcggtgcccaggcgagcggtgttcataaaggtgaacatgcagttcaggcctttgttcgccgggccgatcaggaaaccggtggccgcgtcgaagttcatcacgcaggtggcgttgccgtggatgcccatcttgtgttccagggaaccacaggtgaccgcgttgcgctcgcccaccgaaccatcggcgttgggcaggaacttgggcacgataaacagcgagatacctttggtgccagccggcgcgtccggcaggcgggccagtacgatgtggacgatgttgtcggccatgtcgtgttcgccggccgagatgaagatcttggtaccggagactttgtaggaaccgtcagcctgaggctcggccttggtgcgcagcatgcccaggtcggtgccgcagtgtggctcggtcaggcacatggtgccggtccattcgcccgacaccagcttggtcaggtaagcgtcttgctgctcgggggtgccgtgctcggaaatggtgttcatcgcgccatgggataggccagggtacatgccccacgaccagttggcttcgccgaccatttcgctcacggccaggcccagggattccggcaggccttggccaccgtgctccacgtcgtgggccaggcttggccagccgccttcgacgaattgtttgtaggcttctttgaaacccgcaggggttttaacgcctgactcactccaggtacacccttcgatgtcgcccacgcggttcaacggtgccagtacttgctcacagaacttggcgccttcttcgaggatggcgtcgaccatgtccggagtagcgtcctggcaagccggcaggctctgatagtgcgcttcataaccgagcagttcgtcacgaacgaagcgaatatcacgcaagggggccttgtagtcaggcatagcgataaacctctgctgatgtatctgggatgaacaaccgcgtggatttgttatggcggtcaaacaggtgtttgaaacatacgtttacgacccagggttgtcaagcgtcggccagatgccgtttgtcttgacgcgggtcagcgtcaggcacggcgaggcctgcggcgggatgcctcatggatttaaggacgagcagaatgtcgcagaacgactgtgggagctggcttgcctgcgatgcaggcgccagggtgtatcaggcagtacgcgttgatgctatcgcaggcaagccagctcccacagagaggagcgggcgtgcgatagataagttaagcgtaggtatcgatcaaggtaccgagcatttcatccgaagccttggcgactttcgcccccagttcgacttgaaacttgccctgagccatttccaccatgttgctcgccgagttggacgcttgggcgcggtcattggcttgcagacggtcgctttgcgcggccgatggctgggtggttccggcgctggcaatcttgccggccgcctggtcgacacggttctgcccggtctgaatagtgctcaggcccgaataaaacgcgctgcttccagagatgtccatggcgtaagcctgcctttagagaatcgtgaagcccgattgaaccagacatcctggcaaaaggcccgtcaaaaacactaatggcatattgccttatcgatagccaaaatcagtcaagcaggtccagctccaggtactcggccactgcggcggccccggcatgcttgagtttcggcactcgccccaggcaaggtgcgggcaggcgctcagccagggtggcgaggttttcttccagacgagaggtcttggggtcgatgatatttgccacccagcccgccagcggcaagccatcccgtgcgatggcttcggcggtgagcagtgcatggctgatgcaccccaggcgcacgcccaccaccaggatcaccggcagcttgagcgccatggccaggtccgacaggttggcctggtcggccaagggcacgcgccaaccgcctgccccttcgatcaaggtgaagtccgcgccccgtgccaggacctgctgcatcggtttgagcagcgattgcaccgtgagcccgacgcccgcctcgcgcgccgccagatgcggcgcgatagctggctcgaaggccaccgggttgacctcggcataactgagcggcacggaacactcggccagcaacgccaacgcatcggcattgcgcaggccctgggccgtcagttggcagcccgacgccaccggctttccggcggccgtgcttttgccgcaaagcctggccgcatgcaacaggccggcggcgatggtggtcttgccaacatcggtgtctgtaccggtgatgaagtaagcggcgctcataacggtttctccagtacggcatacaccacctggtacgtggcgggcaggccctgggcctggcggaactgctcgtaggcctctaccagcgcgacaatccgcgcacggcccgtcaaccctcccgggcggcctgggttgaggttatgggcgcccagtgccttgagttcatgggtcaggctgcgcacatccgggtaatgcaacacatggggctttcgctccaggctgatcacgcgcaaaccactggccgcacacagttgctgataagcctcgaaggtgcggaagcgattgacgtggaccaggccatccgccgcccgccaactctcgcgcaactcatccagggtgcctacgcacaggctggcaaaggccagcacgccacctggtcgcagcacacgcctggcttcactgagcaccgcatcaaaatgggcacaccactgcaccgcgagactggagaagaacagctcgaagctgtcagctgcaagcggcaagcgttctgcatcgccggctataaagtgcgcagcgccaccccgtggacgcgcgtggttgagcataccctcggcaatatccaacgccacaccctggctgccgggcaaacgctcgcccaatacgcggctgaagtaacccgtgccacagcccatgtccagccaacgctggggcaccaggccgtgcggcaagcggctgagcagttcatgcccgaccgcacgctgcaactcggccacgctgtcgtaactggccgccgcacgggagaacgaggccgcaacctggcgcttgtccggcaagcccccaggcaagggcgggtgggataggtcagtcatcaacacactcatgcaaaaaagcctggatagccccggcgactccgtgagggtcttccagaagaaacgcgtgaccggcctgttcaatcaggccgatttctacatcggggagcaaggccagcaggtcgctggcggcttcggcaggcaccagctcatccaggccggcaaacaggtgcaactgagggccgcgaaaagcctgcaaggccgcccgcgtatccagttgggccagcagttccaggccgggcatcaagacgctggaggaagtattcggcgcaccgctgaccaataagcgcgacaagccgcgtgggtcttcggcccccttggcacacaacaggccaaaacgcttgagcgtgacttgggaatcggcgtggcagccggccaaaaatgcatcgaaggtttcggcaggcatcccgtgaggccagccgtcatgggcgacgaaacacgggttgctcgccagggtcagcaaaccgcagcaccgctcgccacggcgtgccgccaactcggacgcgagcatgccgcccagcgaccagcccccgagccaggcattgtccggcagcgtcgcatcgagttcatcgagccattcaccgagttcactggcctgcagcaccggcaagggttcgatctgtacctgcaaatgctcgttcaggccgtgcagcgcagcggccaacggctccagcggtgacacacccaggccccagcccggtagcaggatcagtcgattacgcatggccagactccgagtcgcctaataagcgaaaacacgcttgcaacccttctaacagtagctgcacctgcgcttcgctgtgggctgccgtcaatgtcacccgcagacgggcactgccggcgggcacggtgggtgggcgaatggcggtcaccatcaggccgcgctcgcgcagcatctgcgagaggcgcagtgcccgggcgctgtcgccaatcaggatcggctggatcggcgtaaaactgtccatcaacgccaggcctatctgctgcgcgccatggcgaaactggcggatcaacgcgttgaggtgctcgcgtcgccaatgttcgctgcgcagcagttccaggcttttgagggtggcgcaggccagtgccggtggttggctggtggtgtagatatacgggcgggcgaattggatcaggctctcgatcaagtcctcactgccagccacaaaggccccggcggtgccgaacgctttgcccaaggtgccaaccagcacgggcacgtcgtcctggctcaagccgaaatgctcgacgataccgccgccattggcgcccagcgggccgaagccatgggcgtcatccaccatcagccaggcccctttggcccgggtttcacgggccagcgcgggcaggtcggcaaggtcgccgtccatgctgaacacaccgtcggtgaccaccaaggtattgccggtggctttctccaggcgcttggccaggctacccgcgtcgttatgcaggtagcggttgaaacgcgcaccggacagtaagccggcatccagcaaagacgcgtggttaagccggtcttccagtaccgtatcgccctgccccaccagcgccgtgaccgcgccgaggttggccatgtagccggtggtgaacagcaaggcacgcgggcgaccggtcaagtcagccagggcttcttccagctcatggtgcggtgtggcgtggcccaccactaaatgcgaagcgccaccgcccacgccccagcgggacgcaccggcgcgccaggcttcgatcacttgcgggtgattggcaaggcccaggtaatcgttattgcagaacgccaacaacggttgcccgtccaccaccacctgcgggccttgggggctctgcagcaaggggcgctggcggtaaagatggtcggcacggcgggcagcgaggcgcgcggcgagatcgaatgacatgctggcctcgattcaacaggttcaactgcgtccaatgtgggagctggcttgcctgcgatagcggtccttctgacacttctacgctgaaagtgccgccgtcatcgcaggcaagccagctcctacactggaatgcattccaaaggtggttacaccacagcgttgtagaactgctcgctgctcttttgctccaccaacgcctgctcgatcgccgcctggtgcacttcgtcggcatgctcttcacgggcttcgggcaggatgcccaggcgtgcgaacaattgcatgtccttgtcagcctgggggttggcggtggtcagcagtttgtcgccgtagaagatcgagttggcgccggcaaaaaacgccagggcctgcatctgctcattcatggcttcgcggccggccgacaggcgcacgtgggactgcggcatcaggatgcgcgccaccgccagcatgcggatgaaatcgaaggggtcgatgtcatcggcgttttccaacggcgtacccgctaccttcaccagcatgttgatcggcaccgattccggatgctccggcaggttagccagttggatcagcaagttggcgcggtcatcgagagattcgcccatgccgaggatgccgcccgagcagatcttcatccccgaatcacgcacgtacgccagggtttgcaggcgctcgctgtaggtgcgggtggtgatgatcgagccgtaaaactccggcgacgtatcgaggttgtggttgtagtagtccaggccggcctgggccagggcttcggtctggtcctggtcgaggcgaccaagggtcatgcaggtttccaggcccatggccttcacgcctttgaccatttccagcacgtagggcatatctttggccgatggatgcttccacgccgcgcccatgcagaaacgcgtcgaaccgatggccttggcgcgcgcggcctcttcgaggaccttctgcacctccatcagcttctctttttccaggccagtgttgtagtggcccgactgcggacaatatttgcaatcttccgggcaggcgccggtcttgatcgacagcagggtcgagacctgcacgcggttggcgtcgaaatgcgcgcggtgcacggtctgcgcctggaacaacaggtcgttgaagggctgcacgaacaaggctttgacttcagctaaagaccaatcgtgacgcagggtggcagaggtgctggcgctcatgggcgattccttgattatgctttggcaagcgctgtgggaagggcaatacccacaggcacgacacggatgctcggcatatttaaggaagattcatgcactgtcaacctgagtacaaacaccaagtttacatctggtcaaaaagcatacagccctgcctgatttgcgatgagagcactgaattagccgaggccgtgtgcagcgcctgcgaaacagaattgccatggctgatggaacaatgcgagcgttgcgcactgcccttgcccatggatgggttgatctgcggccagtgccaaaaacagcctccggcctttcaccaagtgatcgcgccatggacctacagttttccagtggacaccctgatcagccgcttcaagcatcaggcgcgttggccgctggggcacttgctggcgcgcctgctggggcagcacttgcagcatcgcttcgataacgccgaactggagcgccccaactgcctgctgccggtgcccatggcgcgtaaacgcctgcgcgaacgcggctttaatcaagcgttgatgctggcccgctggctcagtcacgccctcgacattcccattgatgaacacgcgctgttgcgcccccatgaaaccgtggcgcagcaagaccttgatgccaagacccgcaaacgcaacctgctcaacgccttcgcactggcccccggcatccgggttgccgggcaacatgtggcgctggtagacgacgtcctcaccaccggcgccaccgcccacggcttggcgcgcttgttgataaatgccggcgcacgccaggtggacgtgtattgcctggcccgtacgcccaagcccggcagctgacttgactcccctgcgccatcgcggcaacgtcggcgcatctcacccaagcgtatctgccatgtctgtgcccaaccctctcaaccaacacatcatccgccgcccccagcgtattgccttgctggggcatatcgccgagcagggctccatcacccgtgcggccaagagtgccgggttgagttacaaggccgcctgggacgccattgatgagctgaacaacctggcgcaaaaaccgctggtgcaacgcagcgtcggcggcaagggcggtggcggcgccaaactgacgcaagaaggtgaacgggtgctgcgcctttatcagcgcctgcaactgctacaggccgagatccttggctctgacgaagcggccagcgacttcgacctgctgggccgcttgatgctgcgcaccagcgcgcgcaaccaattgcacggccaggtcagcgccatagagagccatggccacaacgacatgatccgcctgcaactggccggaggcctgcacctcgacgcgcagattacacacgacagcaccctgcgcctggaactgcagaccggcgtggaagtggtcgcgctgatcaaggccggatggctggaattactggcggaggggcaaaccgaaacacttggacacaattgcctggaaggcagtatcgagaccattctcgccgccgaagacggccccagcgaggtacgtatcgccctgcccaacggccaagtgttgtgcgcgctggcgcagcccgtcgcactcaaggccatcgacgcagcgcagggccagccgatccgcgtgcagtttgcacccagccatgtattgctcggcaccccggtgtaacgggcccgcgtcttcaagctgcaacaattcggtcacaagcgctgcttaaggtgtctgcaaaaaccttaaggagcctgtgatgagcctattagaagaaaaccaagccaccgaccttgaacagatggtgggcctgacccgccgtcgctttatcggcgcaggcgccctgtgcggcgccgcgatgttccttggcggcaacctgttgagccgtagcgcgctggcggtgaatgccgcttccgccagcccgctgctcgggttcaccagcattgccgctgccaccagcgataccatcaccctgccaccgggctacagcgcttcggtgctgatcagttggggccagcccctgcacaagcacgccccggctttcgacccgtccggccatggcaccgccaaggcccaggaacaacagttcggcgacaacaacgacggcatgagcctgtttgcgttcccaggcgacgacaaccgcgcactgattgcgatcaacaacgaatacaccaactatcgctacctctacgcccacggcggcgcgccacaatctgccgaagacgtgcgcaaggccctggccagcgaaggcgtgtcggtgatcgaagtgcggcgtcagggtgacacctggcagttcgtccaggactcgcgctacaaccggcgcatccacggcaattcaccgatccgtttgagtggccctgccgccggccatgactggctgaaaaccggcgccgacaagaccggcaaaaaagtccttggcacgttccagaactgcgccaacggcaagacgccgtggggcacctacctgacctgcgaagaaaactttaccgactgcttcggcagcagcaacccgcagcaaaccttcgacgcagggcagaagcgctacggcgtggtggccgccagcaaggacatcaactggcatccgcacgacccgcgctttgatatggccaagaaccccaacgaactcaatcgccatggctgggtggtggaaatcgacccgttcgatccgcagtccaccccggtcaagcgcacggccctggggcgcttcaaacacgaaaacgcggccctcgccgaaacccgtgatggccgcgccgtggtgtacatgggcgacgatgaacgcggtgagttcatctacaagttcgtcagccgcgatcagatcaaccacagcaacccgaaggccaataaagacctgctcgaccacggcaccttgtacgtggcgatcttcgacgcgggcgacggcaacgccgaccatcccaagggcaaaggccagtgggttgaactcacccatggcaagaacggcatcgacgccagcagcgggttcgccaaccaggccgaggtgctgattcacgcacgcctggccgccagcgtggtgaaagccacacgcatggaccgcccggaatggatcgtggtcagccccaccgacggccaggtttattgcaccctgaccaacaacgccaagcgcggcgaagagggccagccagtgggcggccccaacccacgggagaaaaacgtctacggccagatcctgcgctggaaagccgacgccgataaccacggtgccacggacttcacctgggacctgttcgtggtggccggcaaccccggcgtacatgccggcaaccccaagggcggctcgtccaacatcaacccgcaaaacatgttcaacagccccgacggcctgggcttcgacaaagccgggcgcctgtggatcctcaccgatggcgactacagcaacgctggcgactttgcgggcatgggcaataaccagatgctgtgtgccgacccgagcaccggtgaaatccgtcgcttcatggtggggccggtggcgtgtgaggtgacggggatcagtttctcgccggaccagaagacgctgttcgtgggcattcaacacccgggtgaaaccggtggctcgacctggccggaacacttgcccaatggcaagccgcggtcgtcggtgatggcgattcgtcgggacgacggcgggatcgtaggcgcctgatacaccgctatcgcaggcaagccagctcccgcattttgatgtgtaaatacatgccagtgtgggagctggcttgcctgcgaaggcgtccgcacagccaccggctatctatgctgttaccatacccggccggacgcggcgccctgctgcgcgcaggagttcgcatggcccacccgtttgaaacactcaccccagacctggtgctcgacgccgtcgaaagcatcggttttctcagcgacgcgcgagttctagcgctcaacagctacgaaaaccgtgtgtaccaagtgggcatcgaagacgccgaaccgctgatcgccaagttctatcgtccccagcgctggaccaacgaggcgatcctggaagaacaccgcttcaccttcgaactggccgagtgcgatgtaccggtggtcgcgccgttgatccacaacggcgagagcctgttcgaacacgcaggtttccgcttcaccctgtttccccgccgtggcggccgcgcgccagagccgggcaacctcgatcagctttaccggctcgggcaactgctcggtcgcttgcacgccgtaggctccactcgcccattcgaacaccgcgaagccctgggggtgaagaatttcggtcacgactccctcaccaccctgcttgaaggcaacttcattcccaaaagcctgttgccggcctacgagtccgtggcccgcgacctgctcaagcgtgtggaagaggtttacaaggccacgccgcacaagaacatccgcatgcacggtgactgccaccccggcaacatgatgtgccgcgacgagatgttccatatcgtcgacctggatgactgccgcatgggcccggcggtgcaagacctgtggatgatgctggctggcgaccgccaggaatgcctcggccagctctcggaactgatggacggctaccaggaattccacgacttcgacccccgcgaactggcgctgatcgaaccgctgcgcgccctgcgcctgatgcactacagtgcctggctggcgcgacgctgggacgatcccgcattcccccatagctttccgtggtttggcagcgagcggtattggggcgaccaggtgctggcgttgcgcgagcaactgtcggcgctcaatgaagaaccgctgaagctcttctgacctggccctgcctcctgtgggagctggctgtccatgctcgcccccacgctccgcgtgggcgcgcatcctgtgacgctccgcgtcacgatttaaaagcagacgcagagcgtccaaggcggcgttaccacgcagagcgtgggaacgagcgttgtctgacaaatatccttacaattgcgctttgttagctgcctaagcaaggattctgcaatgcaagccgccaacccccgcaaggggtacatcctgggcctgagcgcctatgtcatctggggtctgttcccgctctacttcaaagccatcgccagcgtgcccgccgccgagatcatcgtgcaccgcgtgttgtggtcggcgctgttcggtgggctgttgctgatggtgtggaaacatcccggctggtttcgcgagctgcgcgacaaccccaagcgtctggcgatcctggccctcagtggttcgttgattgccgctaactggctgacctatgtgtggtcggtgaacaccgggcgcatgcttgaagccagcctgggttattacatcaacccgctggtgaatgtgctgctgggcatgctgatcctcggcgagcgcctgcgtcgtttgcagtgggtggctgtcgggttggctgcggcgggtgtggcgcagcaggtgtggcaggtcggtagcctgccgtgggtgtcgttggcactggcgctgacgtttggcttctacggtttgatccgcaagcaggcaccggtcaaggcgctgccagggctggtggtggaaacctggatgctggtaccgattgccgtcgcctggttgctgttcaacccgaccgcccacagcgcgcaactggcgttctggagcacctccgaagcctggtggctggtagccgcaggcccggtgacgctgattcccctggtgtgtttcaacgccgctgcacggcatttgccctacaccgccctgggctttttgcagtacgtggcgccgacgctggtgttgctcgaagccgtgctgttgttcggtgaacacctggcgccgagcacgttgatcgccttcgcctttatctgggccgggctggtggtgtacagcctggatgcctggatgaccgtgcgcaaacgctgatcaaataacgtacaaccctctgcaagccacagcattcgtggcttgcagcgttccaccccaaggttatccacaacctgatccccgccatttgtgcacaagcccttgaaactgctcgttttttgctcaacttgcgcagatgcccggcgggcgtggcctggcgtcgggtctctacaggttatccacaggcccatgcaagatttcgatgcataaccttgtggattgttactcttcctgacgcagctccaccatcaagtcatcggccaaggtttccaaagcctcttgcaaggtttccaacgacagcgtggccggcacttgcaacaacgcctcggcgttgaacagcggatcaccactcatgggcgccgggcgcacatcggtgctcaggcgttccaggttgacgccctgctgactcaacaacgcggtgatctcacgcacgatgcccgagcggtcattgcccaccagggtcatcaggatcggcttggacgccgatgcctggccgctgctgccctcacccaccaacacgcgaatgccgtgggtggataagtcctccagcgcccccaccaatgcctggcgctgctcgctcggcacactgacccgcaggatcccggcaaactgcccggccatgtgcgccatgcggctttccagccagttaccaccatggctggcaatgttctgcgcgatgcgttcaaccaggccgggtttgtcggcggcgataatagtgagtacaagatggtccatggcgcagtccctcggttggttgatcctcgattatagacatgccgcgtttatccagaacgtatgcgtgatcgtcaacggccgtcgcaggcaagccagctcccacagacaaatcgtgtaccattttgatatttatctggaacaatctaatagttttttgagaacatccggttctccgctgtgaccgtacgaccaaagtgggtcgctaaacgacgtatttagtctaattttcacaaccgcaagtcatcatgtagtatgcccaaccgtgcactacataatgaaaatctgaaaaagcgcataagctccgcagagtgaggcaagcaatgactgaacacgttcaagtcggtggcctgcaggtcgccaaagtcctgttcgacttcgtgaacaacgaagccattcccggtaccggcatcactgccgaccagttctgggccggtgccgacaaggtcatccatgacctggccccgaagaacaaagccctactcgccaaacgcgacgacttccaggcgcggatcgatacctggcaccagacccacgcaggccaggcccatgacccggtggcctacaaagccttcctgcaagacatcggctacctgctgccagaagccgcagacttccaggcttcgacccaaaacgtcgatgacgagatcgcacgcatggccggcccacagctggtcgtgccggtgatgaatgcccgtttcgccctcaatgcctcgaatgcgcgctggggctcgctgtacgacgcgctgtatggcaccgacgccatcagcgaagccaacggcgccgagaagggcaagggctacaacaaagtacgtggcgacaaggtcattgccttcgcccgcgccttcctcgacgaagccgcaccgctcagcgccggcagccacgtcgattccaccggctacaagatcgtcgatggcaagctgatcgtcagcctcaaaggcggcagcaacagcggcctgcgtgacgatgcccagttgatcggtttccagggccctgcggccgagccgattgcaatcttgctcaagcacaatggcctgcacttcgaaatccagatcgacgccagcaccccagtcggccagaccgacgctgccggcgtcaaagacgtgctgatggaagccgcgctgaccaccatcatggactgcgaagactccgtggccgctgtggacgccgacgacaaagtggtgatctaccgcaactggctcggcctgatgaagggcgacctggccgaagaagtggccaagggcggccagaccttcacccgcaccatgaaccctgaccgcgtctacaccggcgtggatggcagcgacgtgaccctgcacggccgttcgctgttgttcgtgcgcaacgttggccacttgatgaccatcgatgcgatcctcgataaagacggcaacgaagtgcccgaaggcatcctcgacggcctgatcaccagcctggcggcgatccacagcctcaacggcaacaacacccgcaagaacagccgcaccggttctgtgtacatcgtgaaaccgaagatgcacggcccggaagaagccgcgttcaccaacgaactgttcggtcgcatcgaagaggtgctgaacctggcgcgcaacaccctcaaggtcgggatcatggacgaggagcgccgcaccacggtcaacctcaaggcctgcatcaaggcggccagcgagcgtgtggtgtttatcaacaccggtttcctcgaccgcaccggcgatgaaatccacacctccatggaagccggcgcgatggtgcgcaaggcggccatgaaggcagaaaaatggatcggcgcctatgagaactggaacgtcgatatcggcctgagcaccggcctgcaaggtcgtgcacagatcggtaagggcatgtgggccatgcccgacctgatggcggcgatgctcgaacagaaaatcgctcaccccctggccggcgccaacaccgcctgggtaccttcgccaaccgccgcggccttgcatgcgttgcactatcacaaggtcgatgtgtttgcccgccaggccgaactggccaagcgcgagcgcgcctcggtggacgatatcctcaccattcctttggccagcaacaccgattggtccgaagaagagatccgcaacgaactggacaacaacgcccagggcatccttggctatgtggtgcgttggatcgaccagggtgtgggctgctccaaggtgccggacatcaacgatgtcggcctgatggaagaccgcgccaccctgcgtatttccagccagcacatcgccaactggctgcgccacggcatcgtcaacgaagcccaagtgatggaaagcctcaagcgcatggcgccggtggtagaccgtcagaatgccggggatgcgttgtaccgcccactggctccggatttcgacagcaacatcgcgttccaggcagcggtggagttggtgattgaagggaccaagcagcctaatggctataccgagcctgtgttgcaccgcaggcgtcgggagttcaaggccaagaacggcctgtaaatgaaaaaagccctgatcgaaagatcagggcttttttatcagtgtcagttagaccgcgttgcctgaatcgcaggcaagccagctcccacaggggaatgcatttcaaatgtgggagccgggcttgcccgcgaagaggccaggccagtcaccccacactcagggcaccatccctaactcccgcttcaccaacttcgccaacttcacgctatcaatcggcttgagcaagaaatccaccacgctcaaatgcatcgcatcaatcacatccggcgcttccgcgtctccagacatgatgatgatcggcaacgccgcacgggtggactcacgcacctggcggatcaattccaggccattgctgggcgccatgcgcaggtcggtgatcagcaaaccgatggaactgctcgtcttcaacaaatcccacgcagcctcgccactttcggcagtcatgcagcgaataccatcgagcccaaggatttccgccagcaattcacgcgcgtccttgtcgtcgtccacgatcaaaacgcgttgggggggtaaatcgggctccagcatcacggcgctcagcgcctcgcgctcggcatcactcaaaatatcgtggtcggacatacgtttctcagcagttctcatcaatctcccagcacactcgtcagacatctgcggaagggcgaacaatgtgcacttcgtcggaaagtttgcctagtgggctttctacgggttttggacgattgtcatgtaaggtttttccctagttttgcgcggtattcctcgacctagacttacgtccaatgggcacccactgcgcaggagtcgaccatgcagcacgataacgacaaaaacactgcggtcactgttatgagtaaagctgatgcattcgcacaggcgggtaaaaccgctgtgttgcagaacatccacggcaccctgcaattcctgcaacgcttcccgccgttcaaccagatggaacaggcgcacctggctttcctggtggaacagtgccaactgcgtttctacggccccggcgacagcatcctcaaaccgtcgggcggcccggtcgagcacttttatatcgtcaagcaggggcgggtcgtgggcgagcgcccagactcggcggacaccacctttgaaatcgccaccggcgaatgcttccccctcgccgccttgctgggtgaacgcgcgacccgcacagaacacaaagccgctgaagacaccttttgcctgcaactgaacaagccggcctttatcaagctgttcgcgctgtccagcccgtttcgtgatttcgccttgcgcggggtcagcagcctgctcgaccaggtcaaccagcaggtacagcaaaaagccgtggaaaccctcggcacccaatactccttgaatacccgcctgggtgaattggccatgcgccacccggtcacctgcagcccgcacacgccgttgcgcgaagcggtgactttgatgcacgaacagcaggtcggcagcattgtgatcgtcaacgaacacaaggcgcccctgggcatcttcaccctgcgagatctgcgccaggtggtcgccgatggcaccagcgacttcagccagagcattgccgggcacatgacccaggcaccgttttacttgagcccggaacacagcgctttcgatgcggccatcgccatgaccgagcggcatatcgcccacgtgtgcctggtgcaagaccagcgcctgtgtggcgtggtctccgagcgtgacttgttctccttgcagcgtgtggacctggtgcacctggcccgcaccatccgcaatgcaccccgggtggaaaacctggtggcgattcgcggtgaaatcggccagttggtggagcgcatgctcgcccatggcgcctcatccacccagatcacccacatcattacgctgctcaacgaccacaccgtgtgccgggtgatcgagctgaccctcgcggaaaaaggcgaccccggcgtgcctttcagttggctgtgttttggcagcgaaggccgccgcgaacaaacgctgtacaccgaccaggacaacggcatcctgttcgaggccaaggacgccgtcgaagccgccgactttcgtggccgcttgttgcccctggcgcagcacatcaaccaaagcctggcgctgtgcggcttcagcctgtgcaagggcaatatcatggccggcaaccccgagctgtgcttgtcccgcgtggagtgggcgcggcgcttcggcgcgttcattcgtgaggcgacgccggaaaacctgctgggctcaagcatctattttgacttgcgcgtggtgtggggcgaagagcgcggttgcgagcaactgcgccagggcattctcgatcaggtggcggataaccgcttgttccaacgcatgctggccgaaaacgcgctactacgacgcccgccggtggggcgtttccgcgagttcgtgctgacccgcaaaaatggcgaaaaagccaccctcgacctcaaggtgcagggccttacgccttttgtagacggcgcgcgcctgttggccctggccaatggcatccacgccaacaacaccctggaacgcctgcgccagttggtggacaaggccgtgatcgaacccctggatggcgccgcctatgaagaggcctaccactttatccagcagacccgcatgcagcagcaccaattgcagacccgcgagaacttgccctattccaaccgcgtcgaccccgacagcctcaaccacctggaccggcgcatcctgcgtgagtccctgcgccaggcccaacgcctgcaaagcagcctgagcttgcggtatcagctgtgagtttgtttggctggctgcgcgccaaaaagcccgggctcaaccccgcgcaacagcagcgcctggagcagttacccaagcccgccgaactgggcaacggcccattgcgcagccagcgctgggtagtggtggacctggaaaccagcggcctgaaccttcaccgcgaccaggtgctgtccatcggcgccgtggtcatcgaagacggtgcggtggatttctcccaactgttcgaacgcaccctgcagcgcaccgacaccaagctcagccccagtgtgctgatccacgggctggggcccagtgcaattgccgccggcagcgacccggccgaggcgttgctggatttcatggcgttcgtgggcgacagccctctgctggcttttcatgcgccgtttgatcaacacatgctgtgccgggcgctcaaggacagcctggggtatcgcctggcccatccattcctggatgtggctgacctggccccgctgttgtgccccgaggcgcacattcgcgaggccgggctggatgactggctcaaccgcttcaggctacaggccggcgaacgccatcacgccagcgccgatgcattggcgacggcggagctgatgctgatcctgttcagccgtgcgcgacagcaacagatcgacacgccccaggcgctgcaagcgcgtttggcccaatggaaacggcgcaaacaggcgccttccctttaacgcttcgcgcccgacgcggagcatcgcaggatgcattcccacgcagagcgtgggaacgatctcccgacagacgccaattgcgcccactccacgcctctgcgacaatcgcgaataattctcgttagtttaaacctcttgtttattcggtgatgccttgtcgtcggtccagaccccacgcagtgagcttgttggtgcgttatatcgcgaccaccgtggctggctgttggcttggctgcgacgtaacgtggcgtgcccgagccgtgccgaagacctgagccaggacaccttcatgcgcctgctgggccgtgatgagttgcgcgagccccgcgaaccgcgggcgttcctggtggcgatcgccaagggtttgctgttcgactacttccgtcgtgcagctttggagcaggcctacctcaccgaattgatgctgatcccggaaagcgaacagccttcgccggaagcccagcaactgatcctcgaagacctcaaggccatcgaccgcctgctcggcaaattgtctagcaaggcccgcgccgcgttcctctataaccgcctcgacggcctgggccacgccgaaatcgcccagcgcctgggcgtgtcagtggcccgcgtgcgccaatacctggcccagggcattcgccagtgctacatcgcactgtatggcgagccgtcgtgaccgccatcggctccaaaccggtgtcgtcgcgcgtgctggatgccgcgattgcctggcaactgtccctcgactcgggcaacggcaacgcggtggaacaggaagagttcagcaagtggctggccagcgatgaggaacatgcgcgcgcctggcgccagttgggcatgctcgaccagcgtttcagcatggcctcgggcccggcccgggcggcgttgctgcaatcgcgccacggcatccgccaacgcgtgcgcaaactgggccggggcctggccagtatcgtgctggtgtgcggcctggcgctgtttgccggtgagcgttacgtgcctattcactattggctggccgaccagcgcaccgccaccggtgaacagcgcacgctgaagctggcggacggcacgcggatcaacctcaacacccacagcgccattgatgtgcgcttcgacgaaacacgccgcttgatcgtgttgcaggcaggcgaaattctcgtcgaaaccggccacgacgattcacgccctttctacgtgcaaacccgcgatggcagcctgcgggcgctgggtactcggtttatcgtcaagcgcgaagacgacgctacgcgcctgagtgtgttgcagtcagccgtggccgcccagcccgaggcgttgcaccacgaacaggtgttcaaggcgggccagcaggtgctgatgcgcagcgacggccttggcccgttgctggccgtcaccccggccaccgatgcctgggcgcgcggcatgctggtagtggacaacgctcggctgggggatgtgatcgaggagttggcgcgctatcgcaccggctacctgggggtggataacaacgtggccgacctgcgcatcaccggcagtttcccgctgcatgacaccacgttggcattgaatgcgctgttgccgactttgccggtgcagatcgagcagcacacgacgtggtgggtgaccgtcaagggtaagccttaggtcctgcagcgcctgggcgattgctatcgcaggcaagccagctcccacatttcgaattgcgagcaccttcaactgtgggagctggcttgcctgcgatgaggccctcaagcacacctgcgaaaaatattttcactcatccctatcacttttcgattctcgctcggcacctaggcaattgagaaatatttccattcaggagccgcccttatgtcccgcacgctagacaccttgttgcgccccagcctgttagccgtggcgatcgccctcagcgccccgctggccagcaccacgctgtatgccgcagaacaagcgtccagcgtgcgcgcctacaacctgccggctgcgcctctggccagcacactgaaccagatcgccagccaggccggcctggcgctgaccctcaaccccgcactcgccgccggcaagacctcggcgccggtcaaaggccagttcgatgcgcagggcgcgttgcgtgaggccttgcgggggacggggttgcagttggagcaaagcagtgcgggcacttacaccctgatgccggttccggagggcgtcgtcgccttgccgaccaccaacatcaccggccaaggcagctatgaaagcgcttgggggccggtggagggatatgtagcaaagcgcaccgccgccggcaccaaaaccgataccgcgctggttgaggcaccacgctcgatctcggttgccacccgcgagcagatgcaggaccgtaacgtgcagaacctcgacgacgcggtcaagtacatgcccggcatcgtgtccgccagctacggcagcgacacccgttacgactggatgcgtgtgcgcggcttcgagccgacgcaattccttgatggcctgccactgccccgtggcgtgtacgccaacccaaaagccgaaacctggaacctcgatcgcctcgccctgctgcgcggcccggcttcatcggtttatggtcaaactccacctggtggcttgctggacatggtcagccgccgtcccagcgccgaacagagcagtgctatccaggtgcaatacggcagtgacaaccaccgccagatcaatttcgaaagcactggcaagatcgatgatgagggccagtttctctacagcgttggcggcgtggtgcgcgatgccggtacccaggtcgatcacatcgacaacaagcggtacaacatcgcaccgagcttgacctggaatatcgacaccgataccaagttgaccttgctgtcgcagttcacccgcgacgataccggggcgaccagccagttcctgccgatagtcggcaccaagatcaagtcgccactgggtgacgtttcgcatcataaaaacctgggcgatccggactacgagttctacgaccgtacctattacgcactcggctacgcattcgagcaccgcttcaacgatacctggcagttcaaacagaatctgcgttacaccaaatcagaattgtcgttccaacaattgaccgtgggcgcctttgcctgggcaccggtcgacgccgaaggcaatatggaccgttcttcgaccaacgtggacgagaacatcggacaattggcggtagataacaactttcaggccgacttctccaccggcgacgtcacccacacccttctactcgggcttgaccaccagcgtaccgatacctcgtacctgtcgatttacgggcaggccggacgagtcaacatcttcaacccggtcaacaccacgccagttgaacgccccgcacgctccggcgctttctacgactacaatcagaaaaccgtccagaccggtctctacgtccaggaccagatggctcttgataactggcgcctgaccctggggggccgtgaagactgggtgcaccagggcaccacgtacttcaacaaaaacgacgcgaccaatactgaccgcagcaagaatttcagcgggaacgcggcactgagctatgtgttcgactcgggcttcgtaccgtatatctcctacgccgaatctttccagccggcgagcaacgccagtgcctctcctacagagtcctataaacctaccgaaggcaagcagtgggaattggggatcaagtaccaaccgccgggttcgaacacgctactcagtgccgcgctgtatgacctgacccagaagaacgttctggtcagcagcttccagtccggtggtgtgtctgtcaccgaccagaccggcgaagtgaaagtcaaaggcctggagctggaagccgtatctgacgtgaccgaaaacctcaaagtgatcgccgcctacacgctggccaaatccgaagtgcaaaaaggcgagttcaaaggcaaccgcctgcaactgatgcctaaccagcaagcgtccttgtggaccgactacacctggcacaccggcgcgctcgacggtttcggtatcggcttcggcgcccgctacaccggcaacacctacggcgaccaggccaatacctgggccggcaaggccaacgcctacactgtgttcgacggcgcggtgcactatgacctcggccgcctggacaacagcctcaagggcgcgtcggtgaaagtgaacgcgaccaacctgttcaacaaggactacatttccacctgtgatggctcctattgctacttcggcgaccaacgcagcgtcgtcgccagcgccacctaccagtggtaatcagctgagttaacagccaggccgccccaccgggcggctttggtgcatctgaaggctagacaatgaaaagcaaaaccatccgccgctggtccttcatccacacctggaccagcctgatctgcaccgtattcctgctactgctcgcccttaccggcctgccgttggtgtttcaccacgagatagaccacctgctgggcaatgagcccgaactggcgcagatgcctgccgatacgccccggctcaacctcgagcagcttgtagccaaagcccaggcccatcgccccggcgaggccatgcagtacctggcctgggacgaagacgacaacaacggcgtgatcgcgatcatggcggccaccgccggcacggagccgaactcgtcgcacaccttcatgctcgatgcccgcactggcgaaaccgtcgaaatgccgtctgccaatgggggcttcaccctgttcctgctgcgcctgcatgtggatatgtttgccgggctgccgggcaagttgctgctggcgttcatgggccttctgtttgtactggcgattatctcgggcacggtgttgtacctgccgttcatgcgccgcttgaagttcgccacggtgcgccaggataagtccacccgcctgcgctggctcgacctgcacaacctgatcggcgtggtcaccctgacctgggcgctggtggtgggtgtgactggcgtgatcagcgcctgcgccgacctgatcatcgcggcgtggcgcgaggacagcctcagcgccatgatcgaaccctacaagaacgccccgccgctgacccagcgcgcaaccgccaccgagctgttgagcattgccgccaaggccgtaccgggtatggagccagactttatcgccttccccggcacacgcttctccagcgaacatcactacgctgtgttcatgaaaggcagcacgcacctgacctcccatttgctgacaccggtcctgatcgacgccagcaccctggccgtcactgccatcgccgaacggccgtggtacatggacgccatgggcatgtcccaacccctgcattttggtgattacggcggcatgccgatgaaagtcctgtgggcggtgctggatgtgttgaccatcatcgtgctggtcagcggcatttacttatgggtcgtgcggcgcaaggcggccaaggtatgaagccgcggcagtcgaatttctggaaggtgtttgccataccactggggattggcctgctcagtgccgccgggttgtttgcggcgctgctgggggatgggtggtgggattcgttgagttggatcgggctcgggataccggcaatgatgggtgtatgggggttggttaagcggcgcggctgaggtcgctatcgcaggcaagccagctcccacattttgacctgtgaacgccgtccaatgtgggagctggcttgcctgcgatgaggccgcaaaaacaacgtggccccctcgccaggcaccgcacaaccctctaggctagccacaattcacctcgaggaatgcccatgtccgcgcccagcatgaccttgttccacaacccagcgtcacccttcgtgcgcaaagtccgcgtgctgctgatcgagaccggccaacaggaccgcgtggccctgcacgcttgcatgcccacgcccatcaccccggacgccgatgtggtgcaaggcaaccccaccggcaagatcccggccctgcgcctggccgacggttcggtattgcacgacagccgggtgatcctcgattacttcgaccaccagcatgtcggcaacccgctgatcccccgcgacggctcggcccgctggcggcgcctgaccctggcctcgatggctgacggcatcatggatgccgccgtgctggtgcgttacgagaccgccatgcgcccgccagaaaaacactgggcgccctggctggaagaacagcgcaacaagatccgccgcgccctcgccgagctggagcgagacgccattgccgaactggccagccacttcgacatcgccaccatcagtgtggcctgtgcactgggttatatcgactttcgtcatccggatatgcagtggcgctcggacaaccccaagcttgccgcctggtacgccgaggtcagcctgcggccttcgatgcagcagactcagccgcccctgtaggagcgagcttgctcgcgaaaatcgtcaacgataacgcgggtagtctggttaaacgtggtgtcttggcgttcttcgcgagcaagctcgctcctacagtgtgaggcggtgtgattgaggaagttgaccatcttcgccttcatctgctggtcttcgcgcagtccgatcattgcccttgctccaccttgcgtttacccacgccgtaccaatccagcttgcgtgtcagcaccatcactgtgcccaacaggccaaacagcaacagcgagcccatcaacagcgcgtaatcctcggcactgagcaacccgtacagcaagccatacaacgccgccagtccggccgaaaaccccaggccgtgggcaacgctgcgcagcacatggcacacgtagaagccgatcaacaccacacaggcgctggcggatatcaggtaggccagggcaaagcccagatgctcggacaaggacaacagcagcaggtagaagaacgccagcgcgacgcccaccaaagcgtactggatcgggtgcaccgccaaactcttgagcacctcgaacaggaagaagccagcaaaggtcagcgcgataaacaacagcgcatatttaatcgcccggtcgctcttgaggtactggtctaccgggtcgatgaagttcacgccaaagctgcggttgctgaagttttcacagccttgcccgtccaggcagttctgcagggcttgttccagattggtggagaagaatgtcgtctgccaattggcgctgaaaccctggtcggtgacctcacgttgagccggcaggaagttgccgataaagctcgggtgcggccagttggacgccagtgacacctggctggtcttgcccacgggcaccacttgcagttgctcggtgccttgcaggcgcaggtcgaaggcgaactccaccacggcgggtttcttgctgtcttgctcgggcaacgtcacatgcacaccctcgcccagccaatcgacttgggaacccggcgagaactccagccgctgctcacccagttccagcttcagcgcgttttcaatgccgcgaatatcactgatgcccaccgccagaaacgccggttcaaagcggtaatcggcaaagtcttcggtgatccccaactgcgcaggcagctcgaaacgcccgctgatacggttgtcggcatggaacaaccgcgcctggtagatcccccgcgagcgcagttcggtttgcaccttgccgtcgagttcaaaacggtccggcaggaaatacagacgtccgcgttcttcacgggtttcttcgtagcgcttgttgagcttttcattgagcttccactcacgcacggtcttgcgatacggcaccaccatcaccggcccggtgaggcgctgggcaaagcttgagcttctggcaatgtccatcaatacgccgtcgcgcagttgctgacggtcgctgatgatgccgttgatcatcaacaatggaatcagcaacagcaggatcagcagcgcaatcgcgcccaatttgaaaagcaggttgcggttcatgggtctctccctgttttgatggggagagtctgcccagccggtatgggggatttatgtgggcaatgtggagactgtgtggagatgcagcaccgcttgcacgccgcctggcacattgccgatctgcagggtgccgccgtgcagcttcatcacttcttcgacaaagttgagccccaggcccgtacttttgcgcccactggccgggcgcggcagcgagtagaagcgctcgctcaggcgcggcaaggcgtaatcgggaatcgcctcggcctggttgaacaggctgacctgcacctcgtgatgccgcacctgggcgctgaacctcagcgtgccgccgggcggggtgaaatccagggcattgtccagcaggttacccaaagcctggcgcagcaggaagggttcgccaaacacccgcagatcggcggcgatggcctgctcgacgtgcaagccggcgccttcgatccgcgcacattgagccttgagcacatcctcaaccagcgcggccaaaggaatgctcgactgctcttccagaccctggcgctgctccacctgggccaggttcaacaggcgttcgatcagctgctgcaggcgcgcgctttcgctgtcgatattgccgacaaaccgctgctgctgctcgcggctcatatcgccctgcaacaactccgccgcgccgcgaatcgccgccaacgggcttttcaattcatgggtcagggtatgcacgtagcgctctacgtaagccttgccttccagctgcgtgcgcatgtgttccacggcggtggataactgcttgagctcgccgccgcgataatgcggcaactcggcgcggcggccctcgctcacggcttcggcataggcggtaaggcgtctgagggccaccgtcagccaccacgacaatagcgcgcccagcagcagccccagggtgaccagcccggcgccgtaccacagcaggcgccgctcggtgcgatccacgtagggttgcaacgagctgttgggcttggccacggtgaccacgccgatgatctggccgttatcgcgaatcggcgcccccacgtgcatcactgatgaagtcgggtcgtccacatcgctgcgggtggagcgcgcgccgtattcgccacgcagggtcaggtacacgtcgttccatttcgaatagtcctggcccaccgcttcaccgctggagtcgagcaataccctgcccttggcgtcagtcacgtagatgcgatggttgacctggtttttcggcagcccccagatcaccgcacccggttgacggttgccataggccttgagcagcgctggccaatgactctggccaagggtgccgttcttcacgtcctcgcgcaggatctcggccaacaggttagcggtgtccaccagggtttcttcggtggactggcgcacgccggggcggacttccttcatcacggtgttgagcacgaagtagccggtcaggccgataaacagcgcatacaccaggaaaatccgcagccccaggcgcatcagctgtggctcgggctgtagctatagccaaggccacgatgggtctggatcggctcggcgtccgccgccacactccgaagcttgctgcgcaggcttttgatatggctgtcgatattgcgctcgtaaccggcatcaaagggtacgcccaccgcgtccagcaattgttcgcggctgaacacgcgctcgggttgttccagcaggctttgcagcaggcggaactcatgacgcgtgaggctcaagggttggccgcgatagagaatctgcatgcgctccagatccacttggaacagggttggcgccacacccgggccgacccgcttgagaatcgccctgacccgcgccgccacttcccgtgggctgaaaggcttgaccacataatcgtcggcgccgatctccagccccaccacccggtcgatctcggcatcccgggcactgaggaacatcaccggcacttcgctgaaccggcgcaattgtttgcaggtttcaaagccagtgatgtccggcaggccgatgtcgaggatgaccaggtcggccggggtctggcgctgatgttccagcgcggcctggccgagcgtcagccaggtagtggtgaagccttcgccttgcagggcaaagatcagcgtgtcggctattgccgcttcgtcttcgacaatcaggatgtgcggcatgggttcaatcagcagtccggtttgtcggcagtgtaacgacgcgccgggttaactgcagcgccaaattcacgcagggccttggcgccgatcagcagcgggtagttgaagctgctgcggtcggtgaggttgacctcgacggtgcgcttgacgtcgcccaggcacatttccaggtcgatcaccgggcgctcggccacgctggcttcgtccttgtcatcatcttcgtcggcgcggctcttgatcttgctgatgcgcgacaccttgtgctcatacactttgttgcccgcgtcttcaccgccgaggcggaagcgcacccagtcatcgccgtcgcgcttgaaggtttcgatgtcacgcgccgacagcgaggcggtcagtgcgccggtgtccatcttggccttgaaggtctggccgatctccggcaactggatgtattcatagcgaccgtaaagggtcggctcggccgccatgacaggtacggcaaccagggcgaacgcggcaaggagtaatttcacggcaggatttcctcgaaagaagtgggcggagtctagaccgcaaacacagcacttagttggatgaccgagcatatcgcgcacagtgtgaaacattcgtcgggcattttgcgatttggcctctagactcaccttgcttatcatggcccgcccacagaattccaagagttgcttatgcgccgcctgctcaccggctgtctggttacactgctgctgttactcaacacgctgatcctgatcggccccttgatggtcttcgccctgctcaagctggtggcgccagggcgctcgcgtgactatgcctcatgggcggtgatgtggatcgccgagacctgggccgagatcgacaagctgatcttcgccgcgtgcatccccacccaatgggatattcgcggtggcgaggacctgcgcggcgatacctcttacctggtgatcagcaaccaccaatcctgggtcgacattcccgcactcatccaggcattgaaccggcgcacaccgttcttcaagttcttcctgaaaaaagaactgatctgggtgcccttcctcggcctggcctggtgggcgctggattaccccttcatgaagcgctacaccaaggcgttcctggccaagcacccggagctggcggggcaggatttgaagatcacaaagcaagcgtgcgagctgttcaaacgccagccggtcaccgtggtcaattacctggagggcacgcggttcaacgaggccaagcgcacgcaacaggcttcaccgtataaccggttgctcaagcccaaggcgggcggtgtggcctttgtgctggcggcgatgggcgaacagttggacgcgatcctcgacgtgaccgtggtgtacccgcagcaaaagattccggggttctgggacttgatcagcggcgcggtgccgaaggtgatcgtggatatccgcacccgcgagctgggctcggcgttgtggcaaggggattacgagaatgatccggcctttcgccagaccgtccagaactgggtcaaccagctctggatggaaaaggatgcgcgcatcgagcaactgcgcgaggagccttagctgccggtgccccaagcctgagccaatttacccagtacggagctgctggcgccctcgccgccgaggtatttcaggatcaccggggcaaactgaccgaccatgccgctgtccatgcccaaggcgctgaaggcggtgttcaagtcattggtgcttttcacgttgcccaacaggccgtccaggccgctggtcttgctgccgccggtttggccgagcatcccgctcaaggcaccgaggctgcccaatgcgttattacccgacagcttgtcgaggcccggcacactgttactcagctgcgagaagtcattgccgctcaatttgttcttggccaggcccagcatagcgcccgtgccgcccaccgcttgctcgggggtgatgttcagttgcgaggtcaaggccgtcagcaggtcggccgtctgcgacgtgggcgcggcggcagcggccttgttgttgccaccctgcatgccggaaatggcgttggctgcatcgccaaggctgaaacctgcggcgaataccgggccggcggccacggtcaacaggcaggacagggcaaaaccgcgtgaaatcttcatcgaaacaacctctggatataggggtaaagcaggcgttggactgggtatcccgtcggttgttccaaagcccctcaggaacccatcgaggataagcgggtccatgaactgactatagaatttgtcgagaagagacttatgactgcgatccaacccccagtgattgagcacaagcctgcgttctggagccgccctcgcctgttcatcggcgcctgcgtggtggtggttgccggtatcggcggcgcgctctacacccaggacagcgtcaaatccgcggcgacattggtgaccacgacccagcagccagccgcacagatcatggcccacaaggattacctggaagtagaaccgattgcctccacggcgccagcaccggaccaaagccttgaactctgggcgatccctaaagatggcgcaccggtgtcacttggcctgttaccggaggatggcaaaggcatcattggcctgaacccccgccagcaggagacgatcaaacaaccggtggagttgatggtaagttctgaaaccaaaggtggttcagtgagtaagcagccaaccgggcctacggtgtatcaaggggcactggccactcgctaatcatcggctgcgcaaactcggttcaaactgtcggagcgggcttgcccgctccaacgtcacctgtaaatcgcccatcacacgatcagacattttgaatacttattcaatttgattatagaccgtataaaaaatgaatctaaaaacctgtcaacattcacagtagctcatatcaaattaaatattgatgatggagactccttcaagcactggagcaaacaaggatgaacccctcaacattcaaaaaacagccttctctgagcatgttctgcctgtcaggttttatatcgctggctgcgttatttggagccacttacgcgtcggcggaaagctgtccagatctcagtcaggtcactggttctttggacaacggaacctacaaataccagtttggtaattggaaaggctccaatcagcccggcgcacccgacgctgagaagtcttacctgaatgcagggctacactttgacagggtcacactggcgcaacgggtaatttcaagcacagagggatcggaggatcccaatgaaacagaaagtccgggcacaactgtcgcctacatcagatgcgattatgttggcgcgggagatgacgctcgaatccgactggtcaaacgcgtcggcgagctacctaaaccggatgctggcacttgggaaaatgaaaccaccactaatacagccggcacgatcaacaagtactgcacccatacaagttgctcttttaaataaatacgactaccagacctctcagcgtgggttgtcgcgtggagaattcaaagccgctaaacgcgcgttacctcactatgaaagtcctagctttcaaataatgcagcagggcggccgttggccgcccttttatcttgaactcaagctgcactaaacaaactatgcggatcaatcacaaacttcttcggcacacccgcatcgaactcgccatacccgcgtggcgcgtcatccaggctgatcacctgcacgccgacgatctcggcaatgttgatacggtcccacatgatcgcctgcatcagttggcggttgtatttcatcactggcgtctgcccggtgtggaagctgtgggatttggcccaacccaagccgaagcgaatgctcaggctgcccattttcgcggctgcatcgaccgcacctgggtcttcggtcacgtacagacctgggataccgatcttacccgccacgcgtaccacgcccatcagcgagttgagcaccgtggccggggcttcggccttgacgccatcgtggccgtggccgcgcgcttcaaagcccacgcagtcaacggcgcagtccacttccggctcgccgagcaacgcggcaatctgttcgtgcagcggggtgtcggtggacaggtcgaccacttcaaaaccctgggccttggcgtgcgccaggcggattgagttgacgtcaccgatgatcaccaccgctgcacccagcaaacgagcggaggccgcagcagccaggcccaccgggccggcgccagcgatgtacacggtgctgcctgggccgacgccggccgtgacggcgccgtgatagccggtgggcaggatgtcagagaggcaggtcaggtcacggatcttctccatggccttgtcgcgatccggcagtttcagcaggttgaagtcggcatacggcaccagcacgtactcggcctggccgccggtccagtcgcccatgtccacgtagccgtaggcaccaccggcacgggccgggttgacggtcaggcagacgccggtgtgttgttccttacacgaacggcagcggccgcacgcgacgttgaacggcacggacaccaggtcaccgattttcaggttctcgacgtcgctgcccttctcgatcacttcaccggtgatttcatgccccagcaccaggccggtctgggccgtggtgcggccacgcaccatgtgttggtcggagccgcagatgttggtggagaccacgcgcaggatgacgccgtgctcaatcttcctgccacgggggtcctgcattttgggatagtcgattttctgtacttcgaccttgccgttgccgagatacacgacaccacgattaccagacatgctttcacctcgctgttgtttttatggaactgcgttgccgcttggatgggcagcgcattgagtgctcgggtacagatgctgtttcttgtgttgcttgtaagggcctcatcgcaggcaagccagctcccacattctgggggtgtgaacccgttccactgtgggagctggcttgcctgcgatagcgatctaaagaacgacggtgcgattggcgttcaaaaacacccgccgctcaatgtgataccccaccgcccgcgccaacgtgagcccttcgatatcccggcccttggcaatcaagtcctcgggatagtggctgtgatccaccacctccacgccttgggcgatgatcggcccttcatccagatcgttgttgatgtaatgcgccgtggcgcccaccagtttcacgcccttgttgtacgcctggtgatacggcttggcgcccttgaagcccggcagcaacgagtggtgaatgttgatggccttgccgtccagcttgcggcacagctctggtgacagcacttgcatgtagcgcgcaaggatcaccaattcggcgccggtgtcttccaccacttgccacacctggcgctcctgggacggtttgtcgttggggtccagggggaaatggtagtagggaatctggtgccagtcggccaacggcttcagatcagggtggttggacaccaccgcgaccacatccatcgacaactggccgatgcgctggcggtacagcaggtcgttgaggcagtgatcggccttggagaccatgatcaccactttgggccggtagttcggggccgtcagttcgaagatcatgccaaaagcttcaccacggctcgccaagccgtcgcggaacgcctgctcgtcaaagccgtcaggctgccggaactcaacacgaatgaaaaaccgacccgagaggcggtcatcaaacgaatggtgctcggtgacgtagcagccctgttcgaacaggtagcgggtgaccgcgtccaccgtgccgagcacgctggggcagtcggcggtcaaaatccatgtatcgggtgcgcggctcatgggcgattcctcaggcttgaacgctcaaaccgaattcggccgaggcatcctgcaaccacaaccaccagtaatccgagaagctgcgacggatcaacagttcccaagtgtcttcagcagtatgacggatcaccagttgcgacttggcgaacaccgtacccacggccttgcccaccgggaagttgttggggtgcacgtcgtagctggtggacttcatcagcacatcgcgcacgttagggccgctcaactcaagaatctgctgaccaccgctgacgttgacgatctggatatgcaggtcgcccagggcggcgcgcaggttttgctcggcagcaaactcctcaccgctcggcacaatcaacagccactcatccgggccgagccactgaaggctggtttcacctttgaagaccacgctcagcgggccgggcagttcgataccgacggccttgtgtacgccagcggcgaaggcggcgtcgtggccatcgccacggatagtcaggtggccgaggagtttcttttcacgcacggtcacgccggcattcttgcggcccttgccgaccaggctggcgaggtcggcatggtgcagcgacgactcggccttggcaccggtagtggggcgttgttggtaaacattggctgctgtcataaagcacctgttctgaattctgttgatcgttcccacgctctgcgtgggaatgccgccatggacgctctgcgtccgcccttggggcgcagagcgccccggaatgcattcccacgcagagcgtgggaacgatcaggtgtcagacgttctgccgatcacctttggggtcaaagaacaccgaagacacaatctcggcctcgatcacgctgccatccgcttgcggcgagaacacccgctcgccgatgcgcttcaagccgcccttcaccacacccatggcaaacgaatagcccagggagttatgcgcataacttgaggtaacgtgacccaccatcttcatcggaatcgtctgcttcggatcgaacaccaactgcgcgccttccggcagccacacgttcgggtcaatcggcttgagccccaccaactgcttgcgttcttcacgcacgcagtcttcacggttcatcccgcgccagccgatccacgagaacggcttggtacggccgacgcaccagcccatgttcaggtcgtccggggtcatcgaaccgtcggtgtcttgcccgacgatgatgaagcccttctcggcgcgcaggacgtgcatggtctcggtgccgtacggggtcaggttgtactttttgccggcctcgacgattttttccagcacgcccatggcgtagtcggcctgcacgttgacttcgtacgacagctcaccggtaaacgagatacggaacacccgcgccggcacgccgcccaccaggccttccttccaggtcatgaacgggaagccgtccttgtccaggtcgatgtcggtgacttccgccagcagcttgcggctgttggggcccgacaaggtcatggttgcccaatggtcggtgaccgaggtgaagtacaccttgaggtccggccattcggtctgttggtagatttccagccactgcaacacgcgggcggcgccgccagtggtggtggtcatcaggaagtggttgtcggccagacaggcagtcacgccgtcgtcgaagaccatgccatcttccttgcacatcaggccgtagcgcgccttgcccacgtcgagcttggtccaggcgttgctgtagatacggttgaggaactcgcgggcatccgggccttgaatgtcgatcttgccgagggtggaggcgtccagcaggccgacgctgtcacgcaccgccaggcattcgcgcttcaccgcggcgtgcaggtcttcaccgttgcgcgggaaataccacgggcgtttccactgaccgacgtcttcaaactcggcgccgttcttcacgtgccaggcctgcagggcggtgtagcgtaccggctcgaagatatgcccacagtgacggcccgctacggcgccgaacgtcaccggcgtgtagttgggacggaacatggtggtgcccatctgcgggatggtcacgttcaacgaacgggcggcgatggccaggccgttgacgttacccagcttgccctggtcagtgccgaagcccagcgcggtgtagcgtttgacgtgctccaccgactcgaaaccttcgcgggtggccagttcgatggcggcggcggtcacgtcgttttgcaggtcgacaaattgcttgggcgcccgtgcagtggctttttcgtggggcacctggaacagtgccagggttggctcttcaagacggctcaaggcttttggcagcgtgccttcaaccggggcaaaaccggcttcgctggccgcacgcacaccaccttcaaagccatcggcgagggaatcgccaaggccgtagacgccgttgatgccaccgacgcacacgcgcttttgcggtgcttcgcccggtacaaacccgaggatatcttcacgccaggtcggcttgccgcccaggtgcgaggccaggtgcaccaccgggctgtaaccgccggagctggcgaccaggtcgcagtccagccactcgccggggctggtgactttatgcgctttaacatcaatggccgctacgcgggcgccagtgacgtgcttactgccacgggcttcgatcacggcgctgccggtgaggatgcgaatacctttggcacgagcttcttccaccagtgcaccgcgtgggttgtggcgcgcatcggccaccgcgacaacggtgaggcccgcatcgaaccaatccagcgctacgcgataggcatggtcattgttggtcgacagcagcagttttttacccggtgccacgccataacgacgcacgtaggtagacaccgcacctgcgagcatattgcccggcacatcgttgttgccgtacaccagcggacgctcgcacgcaccggtggccagcaccacacgcttggcacgtacgcggtggatacgctgacgcaccacgccaatcggcgcacggtcacccaggtggtcggtcaggcgttcgtgaatggtcaggaagttatggtcgtggtagccgttgacggtggcgcggggcagcagcaccacgtccggcagggctttcaattcggcaatgacgctggcgacccattcagtggccggcttgccgtcgaggctttcacgggagtcgagcagcgagccaccgaactcttcctgctcgtcggcgatgatcacccgagcaccgctgcgcgcagcggccagcgcagccgcgaggcccgcagggcctgcgcccaccaccagcacgtcgcaatgacggttgaagttgtcgtaggtgtccgggtcgttctcggtgggcgagcgaccaaggcccgccgccttgcggatgtacttctcgtaggtcatccagaacgattgtgggtacatgaaggttttgtagtagaagcccggcggcatcagcttgccgccgaccttgccgagaatgcccatcatgtcgttgttcacgctcggccagccgttggtgctggtggcgaccaagccctggtagagcgcctgttgggtggcgcgcacgttggggatctgcgtggcttcggtggcgccgatctgcagcaccgcgttcggctcttcggcgcctgcggcaaagatgccccgtgggcgcgagtacttgaagctgcggccaatgatgtcgacgccgttggccagcagggctgcggccagggtgtcgccttcaaagcctttgtagctctgaccgttgaacgtaaacgtcaggactttattacggtcgatgcggccaccgttggacaggcgattgatctggctcataccttctctccagaggccttggcggtgaactgaggcttctcaccgatcttgtaggtttcaagaatttcgtaggtgacggtgtcgcgggtggcgttgaaatactggcggcaaccggcggcgtggatccacagttcgtggtgcaggccgcgcgggttatcgcgaaagaacatgtagtcgccccactgctcgtcggtgcaggcattcgggtccagcgggcgcgggatgtgcgcttggccggacgcgtggaattcctcttcggagcgcagttcgccacagtgaggacagaagatatgcaacatagggaatttctcctgttagtgggcgacggccgcagcgccgtgttcgtcgatcaacgcaccgttgtggaaacggtcgatggaaaaaggtgcggccagcgggtgcatttcacccttggccaggctggcggcaaacacgttgcctgagcctggagtggccttgaagccgcccgtgccccaaccgcagttgaagaacatgttcggtaccggggtcttggagatgatcgggcaggcatccggcgtggtgtcgacgatgccgccccactggcggttcatgcgcacccgcgacagcaccgggaacatctcgacgatggcctggatggtgtgctcgatcaccgggtacgagccacgctggccgtagccgttgtagccgtcgataccggcgccgatcaccaggtcgcccttgtcggactggctgatgtaaccgtgcacggcgttggacatgatcacgctgtcgataatcggcttgatcggctccgacaccagggcttgcagcgggtgggattcgatcggcaggcgaaagcccgccagcgaggccatgtgcccggagttaccggctgtgaccacaccgacgcgcttggcgccgataaagcccttgttggtttccacaccgatgcacacgccgttttccttgcgaaaaccgatcacctcggtctgctggatcaagtccacgcccaaggcatcggcggcacgggcaaaaccccaggccacggcatcgtgacgggccacgccgccgcgccgttgcacggtggcgccgagtacggggtaacgggtgttcttcgagcaatccaaatacgggatttcgtcggccacttgctgggcattcagcagttcgccgtccacgccgttgaggcggttggcgctcacacgacgttcggaatcacggatgtcctgcagggtgtggcacaggttgtacacgccacgctgggagaacatcacgttgtagttcaggtcctgggacaggccttcccagagtttcattgcatgttcgtacaggtgcgccgactcgtcccacaggtagttggaacgcacgatggtggtgttgcgcgcggtgttaccgccgcccagccagcctttttcgaccacggccacgttggtgatgccgtgctccttggccaggtagtaggcggtcgccaggccatgcccgccaccgccgacgatgaccacgtcgtagacctttttaggggtcggcgtgcgccacatcttctgccagttttcgtgatggctgagggagtgcttgaagaggccgaagcctgagtagcgttgcatagtcattactccaaaaccgcgctcagcgataaaccgggaaatcagcgcacagggcagacacgtgcttggccacgttggcctcgacatcggcgtcaccgaggttgtcgaggatgtcgcagatccagccggccagctcgacgcactgcggcactttgaagccacgggtggtcaccgccggggtaccgatgcgcaggcccgaggtcacgaacggcgactgcgggtcattgggcaccgcatttttgttgacggtgatgtgggcgcgacccagagcggcatccgcctctttgccggtgaggccttggcggatcaggctgaccaggaacaggtggttgtcggtgccgccggagaccacatcgtagccacgcttgatgaacacttcggccatggcctgggcgttatcgatcacttgctgctggtacgccttgaagccgggctccagcgcttccttgaagcacacggccttgccggcgatcacgtgcatcagcgggccgccctgggcgccggggaataccgcagcgttgagtttcttttcgatttcttcgttggccttggccagaatcaggccgccccgtggaccgcgcagggtcttgtgggtggtggtggtgaccacgtcggcataaggcagcgggttggggtacaggccggcggcgaccaggccggcaacgtgggccatgtcgacgaacaacagcgcgcctactttgtcggcgatctgacgaaagcgtgggaaatccagggttttggagtaggccgagaaacccgccaccaccatcttcggcttatgctcgaccgccaggcgctcgacttcgtcgtagtcgatcaagccggtgtcggtgttgatgccgtattgcaccgcgttgtacagcttgcccgaggacgacactttagcgccgtgggtcaggtgaccgccgtgggccaggctcatgcccaggatggtgtcgccggcattgatcagcgccaggtacacggcgctgttggccgaggaaccggagtgcggctgcacgttggcgtaatcggcgccgaacagctgcttggcgcgttcgatggccagggcttcgaccttgtccacatgctcgcagccaccatagtagcgcttgcccgggtagccttcggcgtacttgttggtgagaccgctgccttgagcttccatcacgcgcttgctggtgtagttctccgacgcgatcagctcgatatgatcttcctggcgctgctcctcggcattcatcgccgccagcagtgcgtcgtcatatccctgaatctggtcttgtttgctgaacatcgcgtctctcccagcctttcgtattgttgaggccctcgcagggccctttgatgcgatggtagggctggcgcgtgcgggccaaatgcctgcgcacgccacgcaaaggtgcgtttacgacatgggctgaagaatgtgcaaaagcttgtgtgggagctggcttgcctgcgatcgcatcgctgcggtgcaacgggcagaccgaggtgtctgcatcgcaggcaagccagctcccacaggggttaggcgatgagtttgcgaacgagtagcaacagaagaaaatgcatgggatacagggcataggcccagcgtcgcatggccgggggtttggcgtttttgccgtgtcgcaataagaccaacccagccagcggcgcactcagacatgtagccaaccccaacagcgccacaagcgtgccgctattgagcagaatctgccactgattggcggcgacgcagaccaaacccggcagcacgctgaaataccagggccgtcgaaacaccagcaataacgccagtggcagcaatacaccaaagaaaccgaacatcaaatgctgtgaaaacacggctgccattgtagcggcgatcagcgccaatcctcgatcaaccaacgccttttgctgccaacctcgggcaaccagcaggcccagcgccagggtcggcaacacgttcaaggtatcagcatcttcgataaacatccgataaggcacttcgctgatcacgctgaacagcagcaaccaacccaagtagcgccaatggccggtcaccggggcgtaacggacgcgatgcaaattggccgcaatcgccaggcagaaccatggaaacgccaggcgccccggcacgtatagcccatccaggctcagccccacatagcgcaggtgatcaagcaccatactcagcagcgccagccacttgagcagatccaaagcgccatctcggacaggtccgacaggcagggtgtgagtaccgtgcataattccccaacgactttgcatttacagtgcgtgcgcgcccccggcaatcttgggtaaagtgcgcaccaacatcgaccacaggaacgggccatgaccgacaagagccaacaattcgccagtgacaactattccggcatctgcccggaagcctgggccgccatggaacaagccaaccagggccatcagcgcgcctacggcgatgatgaatggacccaccgcgccgccgacggtttccgcaatctgttcgagaccgactgcgaggtgttcttcgctttcaacggtacggccgccaactccctggcgctgtcctcgttgtgccagagctaccatagcgtgatttgctcggaaaccgcccacgtcgagaccgacgaatgcggcgcgccggagtttttctccaacggctccaaactgctggttgcccgcaccgaaaacggcaagctgaccccggaatcgatccgcgagatcgccctcaagcgccaggacatccactaccccaaaccccgcgtagtcaccctgacccaggccaccgaagtcggcagcgtgtacaccccggaagaaatccgcgccatcagcgctacctgtaaagagctgggcctgaacctgcacatggacggcgcacgcttcgccaatgcctgtgcattcctgggttgctcaccggccgacctgacctggaaagccggcgtggacgtgctgtgctttggcggcaccaaaaacggcatggccgtgggtgaagccatcctgttcttcaatcacaaactggctgaagactttgactaccgctgcaaacaggccggccagttggcctcgaaaatgcgcttcctctcggccccgtgggtgggcctgctggaaaacgacgcctggctcaaacatgcacgtcatgccaaccactgtgcacaactgctcagcagcctagtggcagatattcccggcgtggaattgatgttcccggtacaggccaacggcgtattcctgcaactctcggagcccgcgattgcagcgctgaccgccaagggctggcgcttctacaccttcatcggcaaaggcggtgcgcgtttcatgtgtgcgtgggataccgaggaagagcgtgtaagggaattggctgccgatattcgggaagtaatgaacgcttaacgtacgaattcggccagttggtactggccgattgccgagactgttttttgatatttctgaccgctacgtagctcgctttcattgtctagcctcttgttacccgcaaggaaaacgcagcgataactgccacctttcgggtttcaccgccagccgaataatcggccgcaaaggcacatcaatggagaggtttctcatggaatatcaaagcaatggcaacacactgcaaagcggcggcagcactagcaccacggtcatagactgggacgagttcaggaaacacgccaaaatcggggacaccattcaagagccatcacggacgttgaccatctacgacaaagcctacgaattgacaaactcaggccagcacttcgttgtccatatctacgcccaataactgttaacgcctaagcgccgcgtcgcagattcatggcctgcgacgcgacgctgaatcatgatcgctcctgcgctccgcgtgggaatgcctcctcggacgctccgcacccacccgaaatcaaggatgaacacgtgggcagaagccgctatgtcatcaccgaacccgaaaaaccccacttcctcacctgcactgtcatggaatggctccccctcttcacccgcaactacctggtggaccatcttctggattgctggcgatatcaacaaagcaaccacgctttaaacttgttcggttacgtcatcctggaaaatcacttgcactttattgctcaagcgcccgatctgggaaagtgcgtcagccaattcaaatccttcaccgcccgcaccatcattgacgacctgcaaagcaaaggcgcggagcgggtattgcagcgcctgcgtttctgcaagcgtgcacacaagacagatcgtgtttatcaactgtggcaggaaggttcacatgcggaattggtttacagcgaggcagtcatgcgccagaagcttgattacatccatcacaaccccataaagcgaggctatgtggacctggctgaacactggcgttactccagcgcccgcaactatgcaggtatgccaggcctgatcgacatccaaccttggctctgaagatccgcgtcacccttcatttgcgacgggacgcggagcgtcctggaaggcgttaccacgcagagcgtgggaacgagcatgtagccttctgccgggaagatcgttcccgcgctccgcgtgggaatgcagcccgtgacgctccgcgtcacccttcatttgcgacgggacgcggagcgtcctggagggtgttaccacgcagagcgtgggaacgagcatgtagccttctgccgggaagatcgttcccgcgctccgcgtgggaatgcagcccgtgacgctccgcgtcacccttcatttgcgacgggacgcggagcgtcctggaaggtgttaccacgcagagcgtgggaacgagcagatcagaactcgatccgcacatcacccttcggcacactgcagcacgacaggatgtagccttcggcctcgtcctcttcggtaatcccgccgttgtgctccatctcgacctcgccgcccagcttcatcaccttgcacgtgccacagatgcccatgccacaggccttggggatcagcaggccgagcttggcggccgcggcgtgcaccgtttctcccggtgccacgcgaatgctcttgccggacgcgataaattccacttgatgcaggtctgccaggtcgacctccggcgcatccgccgcttgctcggcctgctccaccgcatcggcacgggcttcgggcggcgtcgcgccaaacgattcctcgtgataacgggtcatgtcgaaaccggcggcctccagcaagcgcttcaccgcgctcatgtacggcgtagggccgcagcagaacacttcgcgctcaaggaagtccggcaccatcagctccagcattttgtggttcagatagccgcgatacccggcccagggttcgcccaggccgtgtttttcgcaaatcaggtgcaggctgaagttgtcgatccgcgacgccatgtgctccagctcgcggtgatagatgatgtccttgggcgagcgggcgctgtggacaaaagtcatgtcgacgttggcgttggtgtcgtagaaccagcgcgccatggacatgaccggcgtgatcccaacgccgccgctgaggtacagcactttcgggcttgggaagtcgatggcgttgaacagcccgaccgggccgtgtaccgccaactcctggccttcgtgcagggtgtcatgcagccaattggaaacccgaccgcccggtacgcgcttgatggtcaccgaaaagctgtaaggcaccgacggtgagctggaaatggtgtacgagcgcatgatcggctggccttcgatttccagctccagggtgacaaattgccccggcttgaaaaagaacaggatcggctggtcagccataaagcagaaggtgcgcacatcccaggtttcctggatgactttgacgcaacggacgatgtgccgaccattggcccaggtctgggtggttaccggattcaggaaattattggacatgttgttctccaccgccgacgtcggccttatggtggcgattctgcgtaacgcgagaaccacccatttacctatctgcgacattcacatacttacggcgaccagccccaaaagacaggggcttgcgcgtcgggatcagattgggccatgtcgcccatggataaggtccgacgtgacgccgggcccacactcgctcccaacaaagacgcgttctttacgccttgcacagcaccaaccgtagccactattcgccggccacacagaatggccatgaggacacacacgatggacgtcaccgcaaccttaagcttgggcgatccgctggaacccgcacgcaaggccaccgcgcaaatgctgcaagagcgcgagcgcactttttcgctgccgcagccgttttactctgatgagcggctgttcgatatcgacatgcaggagatcttccagaaagagtggttgatcgccggcatgacctgcgaaatccccaccaagggcaactacctgaccctgcaagtgggcaagaacccgatcatcgtgatccggggtgccgacggcgtggtgcatgcgttccacaacgtctgccgccatcgtggctcgcgcttgtgcaccagcgacaagggcaaggtcgccaaattggtctgccactaccaccagtggacctacgagctggacggccgcctgctgttcgccggcaccgagatgggcgccgatttcgacatgaagcagtacggcctcaagccagtgaacgtgaaaaccgctggcggctacatctttatcagcctggccgaaaccccaccggccatcgatgacttcctgtcgacgctcaaccattacatggaaccctacgacatggagaacaccaaggtggcgatccagaccaccttgttcgaaaaagccaactggaagctggtgctggaaaacaaccgcgagtgctaccactgcaacgcgtcacaccccgaactgctgaaaaccctgctggagtgggacgacgtcaccgacccgcgcgccgaccaggcgttcaaggaccacgtggccgcttctgctgccgcctgggatgccgagaagatcccttacgcccatgccagcttcggcctgcgtaaccgcatcgtgcgcatgccgctactcaagggcaccgtgtcgatgaccctggatggcaagcaaggctgcgccaagctcatgggccgcatcaagaacccggacctgggctcgatgcgcatcctgcacctgccccactcctggaaccactgcatgggcgaccacatcattgtgttcaccgtgtggccgatcagcgcccaggaaaccatggtcaccaccaagtggatcgtgcacaaggacgccgtggaaggcgtggactacgacgtggagcgcatgcgccaggtgtgggacgccaccaacgaccaggaccgccgcctggccgaagagaaccagcgtggcatcaactccaccgcttaccagcctggcccttactccaagacctatgagtttggcgtggtgaattttgtggattggtacagcgagcggatgttgagcaacctgggtgctgcgccggcgccgtatctcaaaggtgtggcggcacacgaataaaaatgtgggagcgggtttgctcgcgaacgcggtgtatcagcttgcacatgtagtggctgacacaccgtattcgcgagcaagcccgctcccacaccgacctcacagtgatcaaaatttgatcacccttctcgcagagcgctagcgccctgccctccagcctttacccaacaacttatccacaaagccacccacagcaattgtgggcaagtgcgttgtgcacgcaaattaaatcaagaaaatccgtgacttatttaaacttgcgggttttatcttaagctgttcatttattaaccaaacctccaatagccttgttttgcgtggctttcagcggtaagcgaacaccttatccacagatgcgccaacagactttgggggcaactttgactgggctgtggaaaagcctgtcaaagcctcataaatagtggatatccagcagtttagaaggcgaaaatgcgggttttgatcaattatcaaccaacccagcgcaggccacgttttataaggcctgtagcggatagcgaacatcttatccacaaaagcgccaacagactttgggggcaactgcgggctttaatccagttaaaacccaaggaaaaaccgtaagttaggttggttgtttttcgtacagagggctgcagagcttgatacgccgggcttgtggacacccgcgaacagtttatccacaggcggatcaacaggcattgtgggtaagccaaagcctctgcaagaaaatgtgggagcgggcttgcccgcgattgcagcacgtcaacgtaggcatgggttactgacccaccgctatcgcaggcaagccagctcccacaaagtttgatggtggtcagggatcagcgtacgacgccctcttctacaagaagcttgagaattgcctgcgcgccctcttcggcgctgacgcccttgagcacctgcccaccgccgccactggccttggctgtggcagctttcatgcgatcggcgccgctcttggccttgatcaccttgaggcgcttgggccgtggcttggccggttgcaacagtgcgcctgtgaataactcgtcgtgttcaatctcgacgtcatgggcggccagctcaccccgttgcgccgggccgtatgcgctctggcgtggcttgggcgcggcgttatccacagtggcgagaaacggcaggcgcaccttcaagcgccgccgctggccgcgaggcagcgcctgcagcaccagggcgacgccggcgtcgatggactccacctgcgccagccccacaatcagcggccagcccagttgttcggccaacaggaacggcagcattcccgaaccttcgccggtttctgcctggcttccagtgagtaccacttgggcaccggcgtcgcgcagatactcactgagcaccggcaaggcatccgagccggccggctgttccagtacctgcagttgcggcaggcccatgcccaggtagctgcgcagggtcggctcgctgacattacccgcgtgcagcacctgcaacttatccccagccagttgcagccccagctcgaccgcgcgcgcgtcctgctcggcgcggcgtggacgcccggaggtggggtgagcaccgatggacaccaggctgaatacagtgttcgtcatggtcatatcctcaggctgcatcgcgcttggcgccgttgcggtaggtttcgaccgctgcgatcaaagctttgagtatcgcggcgctttcaccgatcaccgacaggtcggcacgcttgatcatgtcgcaacccgggtcgaggttgatcgccaccaccttgtcgcaggcaccgatgccttgcaggtgctggatcgccccggaaatgcccacggccacgtagacccgcgcggtgacccaggtaccgctggcgccgacctggcgatcacgcgccataaagccatcgtccactgccacccgcgaggcgccttcggtggcgcccagggccgcggcagtctggtggaacaacgcccagtccttcacgccgttgccaccggagaaaataaactctgcctcggccattggaatcgctgccgggtcgaccgccaccgcacccaagtcttcgatacgcggcaaactgcgcgccaggcttgtggataactccacgggcaagacttcgtggcgagtttcactgaccggatcggcacattccacggcggcaagaatcagacgtggcaacggccgcgccaggtcttcctggccggcaccggcacggccgatgcattcctcacccttgatctgccacacccgcgttgccgggcgttccttgaggctggcggcaaagcgtcgccccagttcgccccccccgctgcggctgtccggcagcaaccagtggcgcgggctgaattggttatccacagcgcgcaggccctgcacgcgttgctccggtgcataaccctcgaactcatgcccatccagcaccagcagacggtcgacgcccgccgtggcaaaggcgctttccttgtgttcaccgaacaccaccgccaacaccgcgccgtcactaccggccaactggcgcgccagaccaagcaggtcacggtcgtggctgctcaggcggccaccgaccatgtccggtaccacgttgatgtagaacgccggggccggcacctgatgcagcggcaattgcacttccactgccgcggtgcgcttggccgcgctgccctgctgggcaccgctgcggtcgatgcgcttgatgccgttggggccgataaaactgacaccatgcacgtttttgcgaatgacgccgttgggccccatccagctgtgttgcagcggctgcatcgccgcgtgcaacgggtgcaggcggttacgggcgatccattcggcccgtgggtcgcggcggataatgtcgctcatcagtgcacctccgcaggttcacgcttgaggggggctttggctggcgcggcgtcttcaagcagcgcgtcggctaccagctcggcgatgtccttgatcaacgggcgcggttcgaccacgccttcgagcatcgcggtgcattgcgggcaacccacggccaccagttcggcaccggtctcgcggatgtcgtccatgcgcatatcggggatacgttgcttgccgggaatgtcggtgatcggcgcgccgcccccgccaccgcagcagcgcgaccggaagcccgagcgttgcatttccttgacctcgatacccagcgcccgcagcacttggcgcggcgcctcgtattcaccgttgtagcggcccaggtagcacgggtcgtggtaggtcacgctgttgcctttatgctggcccaggttcagcgcgccctcgccgatcagctcggccatgaaggtgctgtggtgctgcacccggtagttgccgttgaaggcaccgtattcgtttttcagcacatggaagctgtgtgggtcgcaggtgacgatgcgcttgaagctgtacttggccagggtctggatattgcgcgtggccagcagctggaatgtcgcttcatcgccgaggcggcgcgccacgtcaccgctgtcgcgttcttccaggccaagcacggcgaagtcgaccttggcggccttgagtacttttacgaaggcgcgcagggtacgttggttacgcatgtcgaaggcgccatcgccgacccagaacagtacatcgcaactgccattgtcgctgagcagcggcaggttcaggtctgccgcccagttcaggcgaccaccgggggcaaagccgccagggttgtcggtggcgatcaggttttccaggacttcggcgcccttgttcggcgtagcgcctttttccagggtgaggtggcgacgcatgtcgacgatggcgtccacgtgctcgatcatcatcgggcactcttccacgcaggcgcggcaggtggtgcacgaccacagggtctcggcgtccactaggccgttgacgatcggctggtgcgggttgccgccgtgttcgcccaccggtttgccggggtacgggctgccggcgaacttggcatcggtgccaccggccaggccgaccaccatgtcctggatgagttttttcgggttcagtggctggccggcggcaaacgccgggcacgccgcttcgcacttgccgcactgcacgcaggcgtcgaagccgagcagttggttccaggtgaagtccttgggtttttccacgcccagcggcgcggttttatcgctcaggtccaacggtttcaacccggtggagcggccaccgccaaagcgttcggcgcggcggtgccaggccaggtgcagggcaccggcgaaggcgtgtttcatcggcccgccccaggtcatgccgaaaaacatttcggacacgccccacaacacgcccacgctcagcaatgccgcgagcaaccagccgccgaagtcggcgggcagaatcccggccaccggcaaggtcaccaggaagaagctcaccgagaaggccatcaggcttttcggcaggcgcatccacgggcctttggacaggcgcgcaggcggattgcggcggcgcaggtacatgaagatcgcgcctacaaacatcaatgtcgacgccagcagcagtgcatagccaagaatgcggctctgcaggccgaaaccgtgcaccgcaatcgccagcaacgccgacagcacaaagcccagcgccgtcgcaacgtgggtgttggcgatgtatttgtcacgggcgaccacgtggtgcaggtcgaccatgtagcgcttgggcatggccaaaaggccgcccagcaggtcgactttggatgcgcggccacgacgccacatgttcgcccggcgcaaagcgccgaggacggcgaggcccagggcggcaaaaagcaggatgggaagaagggtattcagcatggtgaagctcccactaagatcgttcccacgctctgcgtgggcatgcatcctgtgacgctctgcgtcacgaccttaaaagcagacgcggagcgtccagggcggcattcccacgcagagcgtgggaacgatcaggtgcgtcagaaatccttgcacaagcgcagggcgtcatagatggcggcgtgggtattgcgctgggccacacagtcaccaatgcggaacagcaagtacccctcgcccgcttcgctcaagcagggctgcggcttgatcgcaaacaaggcttcaacgtcgatctggcccttgttgcgtgagccttccttgagcccgtagtaaatggcctcgtccgggcgcacgccgttctccaccaccacctggtcgaccacccgctcctctttggcgccggtgtattcgttctccagcacagccaccagcttgtcgccctcgcggtagaccttttccagcatcatgtcgccggtcatgatcacttccttggggtacatgctgcggtagtacgtggggaacgatgttccgccgatcgccacgcccggcttgatgtcgtcggtgacgatttccacctggctgcctttgtcggccaggaagtcggccaccgacatcccggtgaattcgcagatagtgtcgtacaccagcacgttcttgccaggcagcaccttgccgtcgagcacgtcccaactgctcaccaccaagccttcggcggcgccccagtgttcgttctgctcgatgaacggatgcccacccaccgccagcaccaccacgtccggacgcacgtccaggatggtctcggcatcggctgcgacacccaggcgcaggtcgactttcaaacgcgccagctccagttgataccaacgggtgataccggcgatctggtcacgctgcggcgctttcgatgccgtggtgatttgcccgccgataaactcctttttctcgaacagcgtcacgtcgtggccacgttcagccgccacgcgcgcggcttccatcccggccgggccggcccccaccacaaccaccttgcgcttgggcccggtggacttctcgatgatgtgcggcacgcccatgtattcacgggaggtcgcagcgttctggatgcacaacacatccaggccctggtactggcggtcgatgcagtagttggcgcccacgcactgcttgatctggtcgatctggcccatcttgatcttggcgatcaggtgcgggtcggcgatgtgcgcacgggtcatgccgaccatgtccacatagccgccttccagaatgcgcgtggcctggttcgggtccttgatgttctgcgcgtgcagcaccggaaccttgaccacttccttgatgccggccgccaggtgcaggaatggctccggcgggtagctcatgttcgggatgacgttggccagggtgttgtgggtgtcgcaacccgagcccaccacgccgatgaaatcgagcatgccggtgtcatcgtagtacttggcgatttgcttcatgtcctcgtgggacaagccgtccgggtggaactcgtcaccgcacaggcgcatgcccacacagaagtcatcccccacttcggcacgcacggccttcaacacttccaggccgaacttcatgcggccctcgaagctgccgccccattcatcggtacgcttgttgacccgcgggctccagaactggtcgatcatgtgctggtgcacggccgacaattccaccccgtccaggccaccggctttggcccggcgcgcggcctgggcgtagttgccgatcacgcgccagatctcttccggctcgatggtcttgcaggtggcacggtgtaccggttcacgcacgccggacggcgacatcagggttggccagttgaagccgtcccaacgcgagcgtcggcccatgtgggtaatctggatcatgatcttggcgccatgcttgtgcatggcatcggccaggttctggaagtgcgggatgatgcggtcggtagacaggttcaccgacgcccaccactcctgcgggctgtcgatggccaccaccgaggagccgccgcagatcgccaggccaataccgcccttggctttctcttcgtaatacttcacatagcggtcggtggtcatgccgccgtcggtggcatacacctcggcgtgagcggtactgagcactcggttgcggatggtcagtttgccgatctgaatcggctggaacattgcttcgaaagccatggcacggtcctcggcttacaacggcttgacggtgaacaagccgtcatcgtggccctcttcggagcctccgtagacttgttcggcgacggtgcggatgttgctgccacgcgcttgcaggatctggtccatggcgccggcaaaccagccggtgaacatgtagtccaccttgcggccgaccttgccgtacacatagacgaatgccgagtgttccagcttgacgctggcggtgcctttatccaggtcgatgtcctggatcttgaacaggccccagccgcgttgcgacaggcgtttcatgtaatgctcgaacaccgcgacgccttccaggccgtggcattcagcttctttttcgcaccagtgccaggcggatttgtagccggccttgtagaggatctcggcgtaggcgtccgcgcccagcacttcttcgatgcccatatggttgttgacgaagaaatggcgtggcacgtacagcatcggcagggcgtcggaggtccagacaccggtttcgctgtcgacttcaattggcaattgcggggcgatcttggccatggaaactcaactccagaaaattcgttttgatgcccgccgcacggatggcggcgggtgaaggattaagcgagcagtggcttattcgccccagacgtccttgagcacgttgacccagttctcgcccatgatcttgcgcaccacgcgctcgctgtggccgcgcttgagcagggtctcggtgaggttggggaactcacccacggtgcggatgcccagcgggttgatgatcttgccgaagctggtcaggcggcgggcgtagcccttgtcatgggtgagcatttcgaagaaatcctggccatggccctgggtgaagtcggtgccgatgccgatggcgtcttcgccgacgatgttcatggtgtattcgatggcttcggcatagtcgtcgatagtcgagtcgatgcccttggccaaaaacggcgcgaacatggtcacaccgacaaatccgccatggtcggcgatgaacttcagctcttcatcggacttgttgcgcgggtgctctttaagcccggacggcagacagtgggagtagcacaccggctttttcgattcgaggatgacctcttcgctggtcttggagcccacgtgggacaggtcgcacatgatgccgacgcggttcatctcgccgacgatctcacgcccgaaacccgacaggccgccatcgcgctcgtagcaaccggtgcccaccaggttctgggtgttgtagcacatctgcaccacgcccacgccgagctgcttgaagatctcgacatagccgagctggtcctcaaaggcatgggcattctggaagccgaagatgatgccagtcttgcccagctccttggcgcggcggatgtcggcggtggttttcaccgggatcaccaggtcgctgttttcgcggatcagggtctggctggcaacgatgttattgatcgtggcctggaagccttcccacaccgacaccgtgcaattggcggcggtgaggccacctttgcgcatgtcttcgaacaggtcgcggttccacttggcaataatcagaccgtcgataacgatgctgtcggcgtgcaactcggctgggctcatcaggcgtccccttattggcgattcatgcgccgaatcgtctgccggcgctttggggccagcatatgcccaggcaccgacggagccgggtgcaaaaacgacaggggaattgccgaaagcgtcaatccacgacaaaggctgcgaagacaggccccacggttggctgttctttgtcttacgcttgagccagaattcctcatcacctgatatgagacggcgcaatgaaatcgattttcctggctttggcactcatcgcaaccaccgcccacgcggccgaagacaccgacagcacgccgtgcgacggcatcgagaacgaccagcaaaccctggaatgcgccacctacaacaaaaccactgccgagcaattgctcaaagataactatgaggggttgctggagcgcatgggttcgacctacggcagcgataagaccaaactggcggacattaccgcccgtctgaaggatgcccagcaaaaatgggagaaactgcgggatgccgattgtgcagtggacaccttcccggcagtgaccggcaccaaggcctacgcgattgcgcacaacgactgcctggcgcggatgagtgatgaacggtcggagtttttggagtcgattgggcaggagtaagcacccttcacgcgaccaggccgcgcaaagggctgcgccacgctcaagccatgaaaggtgacttgaacggccttttggtcaagggtgaggctggctcgtaggcataccccagcgcggtgatatccatcacctcacggatacgacgagtccagggtttgatcacatcatcgtaattatgcccggtggggccatcctgcatcgggcagtaatgaggcgccagtgcgggcttatccagcatcatttgcgcctgccagtcggcccagattttgtcgatgaaacaatgatgcagaaaaaatactggatcttcgggcgaggtcatcgccagcatgttgccgccaatccataaatggacgcggttgtgcaattgagaaccaggggtggtgacttgcgggtcgcccttctgagtgatccagccttcgagtcggtttctaaagcctctattgaacggactcgacgtgtagttcggctcgtcatacagcccttcattcattgccatctgcaagtccgcagccgtcggcagcgagttgaccaaacgtgagaactggcgcttcaaccccgcccccggcagcccatcttccggataggcaggcaccggccaattgccgtatcggtacgcgaagggtccatcctgcaccctgaattcatcggcagcgtcaccgtcaccccccagcaggctttgctcccacaccggcgaattcgtcgggtctgccgcgtccaatgtccaatcccagtaaggcagcgtgatgccgggcgtgatggtctgaaggtcggcttccaactgcaacaacatttcacgatgccagggtaaaaaagccggccccaagtgggcgccattacgatagtcgggatcttggggttcatcagggtgaacggtaggtaccatcactgcgtgatgccaatgcacatacttgtcgtatccgccattacccttaagggccaacagcgtattggtaaacgctagccgttcaggcccgctcagttttcgaatttccttgcgaatattcattgcccgcctccctcgtcgcaaaaaaatgggaccgcgtgccagcccctgctgcgaatctagttggggaacccatcaggatctactgtcagatctgacagtatcagcactgcctccgacggatggtcagctcctcttgaacgaaccgagcctgttaccatccgtgccctcttttcctgctcaaggcaacgccatgattatttgcggcatcgaaatcaaaggcagcgaagccatcatcgctgtcgcctccctggacaaccaggcgctgacccacgtcgccctggcgaccaagaaaatcgccctcgacgatgacgacgaagcggccaacgtcaaagcctttgccgcacaggtgaaagcgtttgtgcaggccaatggcatcacgcgtattgccatcaagaaacgcagcaagaaaggtgagtttgccggtggcccgacgacgttcaagattgaaggggtgtttcaattgctggagggggttgaggtgacgctgctgtcgccgcagaccatcaatgcgcaatacaaaaagcacacctttgatctgccagcgacgctcaacaagtatcagcacgaggcctataagaccgcgtgctcatgtctgatgaagaaataaccgcacatcagcttttgacgcagtgctccaagccgtgcccgccgccttcgtactcagggccgtaatagtatttaacgaaggagactttgccttccggggtcggtgtcacttgcgctacgcccacgccaaagtccttcaaggccgggtcggtgtgagcgaagtagatgcccagcgtatccgaggtgccggcggccatgccttcatagcgggacttgtcttccagggtcagggtgaaggtgtaggcggcgtacttgccagtgctttgcgtggcgtcaagtttcatctcgacaacgcctttgaagtggccgatatgtttgtcctggccattacattcataacggccgctgtaatcggcgccggtgaatggcgcgggcgcctgggctgcccataccggggtggacgcgagtgcgatcagagtgattagttttttcagcatgccaacctcttatggttacgtaagaaaccatttggacgttagcagtccttttccggtaatcgcgtgcagcgttgcaaaacaagaatattcccacgccaccacatgcatttcctgacaccacactacttaccaatgtgggagctggcttgcctgcgattgcgatgtatcagttggcctatgcggtgctgacccgccgccatcgcaggcaagccaactcccaccttgaatctgcaccaacgctcaaatcgcctcccgtcgccgatcctcccgcgggcatttggcaaaccttgcgcgatagctcctggtgaaatacgacggtgactcaaacccgcacgcaatactcacttccagcacgctcatgtcgctctggcgcagcagtttgcgggctttttccaggcgcaggcccaggtagaaattactgggcgtatcgttcaggtgcaggcgaaacagccgctccagttggcgtcgtgtgaccttgatcgtttcggccagggccaaggtgctcaggggcggttcggtgtgctgttccatttcgccgatcacgtgcaccagtttcttgttgttgatgccgtagcgcgtggcgatctgcatgcgctggtggtctttgcgcgggcggatgcggcttagtacgaattgctcggaaacctggatagccagctccgggccgtgggcctgggcgatgaggtcgagcatcaggtcgatggaggccgtgccgccggcgcaggtgatgcggcgccggtcgatttcgaacagttcctgggtcacgctcaggtgcggataggcttccttgaaggcgtcgatggcttcccagtgcaaggtcaggcggtggccgtcaagcaggccagcctcagccagcacgcaggcaccggtgtcgatggcgccgagggtcacaccctcatggtcgaggcggcgcagccaatgctccagggcgggcgtggcgaactgcaggggttcgaagccagccaccaccagtaaagtcgcgccttttttcaatagctcaagcgcggcgtcggcgttgaccgacatgccgttgctcgccagcaccgcgccgccatcagcactcaaaatgtgccagcggtacagctcgccgcgaaagcggttggccacgcgcaacggttccagcgcggagataaaaccgagggccgagaaacccggcatcagcaagaaatagacatcctgggacatggtggcgctctcgtcggacgggcagcgtggtcactgtgatacgccagttcaaccggccattcaagagcccaggtcgctgcagtgcaagagcgggtcgccgccgtgcgctttgcggggcgccaagctgcgtaacgtgatcccacggcgcaccaagacgccggcacccacaataacgacctgccgagggctccacccatgaaccgactgatcagccgctgcgtacttgcactcagcgccagcgctattttgagcacccctgtcatggcagcggatgcccctgcttgccagaacgtgcgcatgggcgtggtcaactggaccgacgtcatcgccaccagcgccatggcccaggtgctgctcgatggcctcggctacaagaccaaacaaaccagcgcctctcagcaaatcatctttgccggcattcgcgaccagcgcctggacctgtttctcggttattggaacccgctgatgacccagaccatcacgccgttagtcgacgccaagcaagtcaaagtcctcgacaaagccagcctggaagacgcccgcgccaccctcgcagtgccgacttatctggcggataagggcctgaaaacctttgccgatatcgccaggttcgagaaagagctgggcggcaagatttatggcatcgagccgggctcgggcgccaatacgcagatcaaggcgatgatcgccaagaaccagttcggcctgggcaagttccagttggtggagtccagcgaagccggcatgttggcggccgtggaccgtgccgtgcgccgcaaggaagccgtggtgttctttggttgggcgccgcacccgatgaacgtcaatgtggcgatgacttacctcaccggcagcgaagacgccctgggcccgaacgaaggcatggccaccgtatggaccgtgaccgcgccggcctacgccgaccagtgccccaatgtgcataagttgctgaccaacctgacgttcactgccgccgacgagagccggatgatgcagccgctgctggatcacaaggacgccatcgagtccgccaaacagtggctcaaagaccacccacaagaccaggcgcgctggctggagggtgtgaccaccttcgacggcaagccggctgccgccaacctgcaattgaccaccaaataacccatccagatcaccgcttcgcagcccatgacggttgcgaacggcgccctgcgccttgaaatcacacgcctgtaaggaaccgcctcatgaaccacgacgtcatcatcacctgcgcactcaccggtgctggcgacacgaccgccagaagcccacacgtgccggtcacccccaaacaaatcgccgccgctgcggtggaagccgccaaggccggtgccaccgtggtgcattgtcatgtacgcgacccgcagaccggcaagttcagccgcgatgtggccctgtaccgtgaagtgatggagcgcatccgcgaggccgacatcgacatcatcgtcaacctcaccgccggcatggggggggacctggagatcggtggcggcgagaatcccatggagttcgggcccaataccgacctggtgggcccgctgacccgcctggcccacgttgaagaactgctgccggaaatctgcaccctggactgcggcacgctgaacttcggcgatggcgacaccatttacgtgtccaccccggcgcagctgcgtgccggcgccaaacgtatccaggaactgggcgtaaaggccgagctggaaattttcgacaccggccacctgtggttcgccaagcagatgatcaaggaagggttgctggataacccgctgttccaactgtgcctgggcattccctggggcgcgccggccgataccaccaccatgaaagccatggtcgacaacctgcccgccgacgcggtgtgggctggcttcgggattggtcgcatgcaaatgccaatggccgcgcaagcggtgctgttggggggcaacgtacgggtgggcctggaggacaacctgtggctggacaagggcgtgctcgccaccaatgggcagttggtggagcgtgccagtgaaattctcagccggttaggcgcaagagtcctgaccccagccgaaggccgcatcaagatgggcctgacccaacgcggctaacacagacaccaccactcctgtgggagccggggttgcccgcgatgaggccagtaaatccgccacatctttgtagcctgcaatgccgccatcgcgggcaagcccggctcccacaaaggatcatcgaacactttaggaatatgccatgcgctttatcaccgacatcaaaaccttcgccgcgttgggcagcggcgtcatcggcagcggctgggtgtcccgtgcccttgcccatggcctggatgtagtcgcctgggaccccgcgcccggtgccgaggcagccctgcgcaaacgcgtcgccaacgcctggactgcccttgaacaacagggcctggcgcccggtgcctcccaagaccgcctgcgctttgtcaccaccatcgaagaatgcgtgaaagacgcggacttcatccaggaaagcgccccggaacgcctggagctgaagctgcaattgcacagccagatcagcgccgcggccaagccgaacgtattgatcggttccagcacctcagggctattgcccagcgaattctatgaaagctccacccacccggaacgctgcgtggtcggccaccccttcaacccggtctacctgttgccactggtagaagtggtgggcggcaaaaacaccgcgccagaggcgatccaggcagcgatcaaggtgtatgaatccctcggcatgcgcccgctgcatgtgcgcaaggaagtgccggggtttattgccgaccgcctgctggaagcgctgtggagagaggcgctgcacctggtcaatgacggcgtggcgaccaccggcgaaatcgacgatgccattcgttttggtgccgggttgcgctggtcgttcatgggtactttcctcacttacaccctggcgggcggcgatgcgggcatgcgccacttcatggcgcagttcggcccggcgttgcagttgccgtggacttacctgccggcgccagaattgactgaaaaactgattgatgatgtggtcgatggcaccgcggagcagttaggtaaccacagcatctcggcgctggagcgctatcgtgatgactgtctgctggcggtgctggaagccgtaaaaacaaccaaggccaagcacggcatgaacttcgccgaataaccctgtggaagctggcttgcctgcgatggcggtgttggcctcaccattgctatcgcaggcaagccagctcccacatttgaccgcatactgaattggattcatgccatgcccgcactgaccacctacaccacgaacatcctgcccgactgggtcgactacaacggccatctgcgtgacgcgttctatctgctgatcttcagctacgccaccgatgcgctgatggacaccctggggctggacagcgaaaaccgcgaagccagtggccactcgctgttcaccctggagctgcacctgaactacctgcatgaggtgaagctcggggccgaggttgaggtgcatacccaactgatcgcccatgacgccaagcgcctgcacctctatcacagcctgcaccttgtgggcgaagagcgcgagttggccggtaacgaacagatgctgctgcatgtcgatctggccgggccgcagtcggcgccgtttgccggcgcgaccctggaaaaactcattgccctgagccaggaacacgccgatctaccccggcctgccctgctcggccgggtgatcgggctgcccgcgcaaaaaaaagccccgatccagccgtgacgggatcggggcagagtgctttgtgtgagccgtgcatgtcgagggtgaccaaaccttcaagctgcgtgcctgggttcagtgtgcccgttacgggtcaggtcaagtaccccgaaaacgacctgttcatagccatacgagccatcggtggattctgcccttgccgccagtcctggggcctaccagaatccaagtcaattcccgctccctacaccaggatgaccgtcatgatgcacgcggatttgattgaccaggatgacctgctgggccaactgcgctcgctgggttttgaagtgtccagcggcgctaccgccgagcaggcttgcgaatgtgcggtgcgcgggttgagtgaagcgcgggccaaggcgctcaagggcatggttgaaaagatgtacagcggcagcgcgacgattttgccggcggtgaggcaggcgatcgaccagcaattgttgccggcgctgatgcagttcaaacaaagctctggcgcctgaaataccgctatcgcaggcaagccagctcccacaggggaacgcattccaaggtgggagctggcttgcctgcgatgcacacggctcggtttttagagccttacactggcaaaggtcgactcattgcgcgcctggctcaacgccgacatcggccccgacaatggggacaacaccagtgccggcggaatcggcatcatcgccacttgctgggtggtgttggaacctacgcgctcatcccgtggcggaatgccaaagtactcgcgatagcacttggaaaagtgcggcgtagacacaaacccgcacaccgaggcaacttcgatgatcgacatcggcgtctgcttgagcagttgccgtgcacggatcaggcgcagcttgaggtagtagcgcgacggcgagcagtgcaggtatttctggaacagccgctccaactgccggcgcgacacggcgacatacaccgccagttcgtccaggtcgatcggctcttcgaggttggcttccatcagcgcgacgatttcctgcagtttcggctggttggtgccgagcatgtgcttgagcggcacacgctggtgatcctgttcgttgcggatgcgttcgtacacgaacatctcggagatggcggccgacaattcacggccgtggtcacggctgatcaggtgcaacatcatgtccaggggtgcggtgccgccggagctggtgaagcggttgcggtcgagggtgaacaggcgcgtgctcatggccacccgcgggaaggcttcctgcatcgacgccaggcattcccagtgcacgctgcaatcaaagccgtcgagcaagccggcgcaggccagggcccagctgccggtgcacaccgcgccaaggcggcgagactggcgcgcctggctttgcagccacgacacatgttcacgggtgacggtacgctggatgcccacgccgccgcacacgatgaccgtgtccaggacgggggctttgtgcatggaggcgtcgggggtgatttgcaggccatcgctggcccacacctggttgccgtcgacactcagggttgtccagcgatacagctcgcggccggacagctggttggccatgcgcagtggctccacggctgacgccagggaaatcagcgtgaaattgtccagcagcaaaaagccgatggattgaggcgcacggttctggggttgggccccggagttggtcgacgtcatcgcagtatctcctcacatcacacaaagcaggtggtggcctcaggcgaggctcttgttattgcgctcgtcctggaaaggagaggctttgtaattgatagagcaaatgccatgcctaaaattgaatggctattcaagaactcctgaaaacgacctgttgacgcgtctatacaagcccgcgcgtgaagtgcgggatatgacgcctaacgggcggggttcaaggggtgtgagcagatcggtagcacttgtgggaaggcgctttgcgggcgtaggagaagtctgtcacccaaagcacatcaggcgtgtgatcgtgtaggaatcgttcggaagctacttatctatttgcgacgcgctaaaaggtggcgattttggccggggtgttcactttgtgagcaattatgtcagcactacagccattcagctcgttcccacgctctgcgtgggcatgcatcctgtgacgctctgcgtcacccctgggacgcggagcgtccggggcggcattcccacgcggagcgtgggaacgatcatgtcactgactcaacattcaaccgcactcaccgccaacccaccccgcgatgtctctttgtacttgtcatgcatatcggcccccgtatcacgcatggtgcggatcacccggtccaacgagatgaagtgctggccatcgccacgcaacgccatttgcgccgcgttgatcgccttcaccgccgcgatcgcattgcgctcgatacacggcacttgcaccaaaccgcccactgggtcgcaggtcaggccaaggttatgttccaaaccgatttcagcggcgttgcacagttgctccggcgtggcgccgaggatctccgccaacccggccgcggccatcgcgcacgcagaaccgacctcgccctggcaaccgacttcggcaccggagatcgaggcgttctttttacacaggatgcccactgccgccgcgccgagcaggtagtcgaccacgttggcttcggtgacttcttcactgaacttcataaagtagtgcaacaccgccgggatgatccccgccgcgccattggtaggcgccgtgaccatgcgcccaccggcggcgttttcttcgttgaccgccagggcgaacaggttgacccattccatggcgctcaaggtcgagccgatcacattcggcttgttcagctcctgcaagctgcggtgcaacttggcggcgcgacggcgcacgttcaagccgccaggcagaataccctcgtgcttgaggccctgctccacgcattcttgcatggcgcgccagagcttcatcaggccgctgcggatttcttcttcgctgcgccaggttttttcattcgccagcatcagttcggcaacgcgcaggttgtgggtcttgcacagttgcaagagctccacggcactggaaaagtcatagggcagctcggtgcggtccatatccgccacaccgctttgggcctgggcttcatccaccacgaaaccgccgcccaccgagtaataggtgtcgcggtgcaactcgccgttttcggcaaataccaccagggtcatggcattgggatgaaacggcaggttctcgtcgagcagacgcatgtcccgcgcccacacaaacggcaccggcaaccgcccgtccagcagcagcgtgtcggtttcgcgcaaggtgtgaatacgggcgccgatttgcgtggggtcgattgcgtccggccattcgcccatcaggcccatgatggtggcggtgtcgctgccgtgaccgatgccggtggccgacagcgagccgtacagttgcacttcgacacgctgcacctgttccagccacccacgttcacgcaatccttgaacgaacaacgcggcggcgcgcatgggccccacggtgtgcgaactcgaaggcccgatgccgatcttgaacaggtcgaaaacgctgatagccattaacgtgaaactcctcgataagcacgggccgggcttgaacgaggtgctacgctcagatcgcccagatggcggcatcatcaagcttttattcgtcatcacggcgtctcacaccgacgcactcatgctcaccagcggcgctcgcgtgcgaacgccagttttggccgttttttgcggtgcagaagggtaaaaacagcagttttaccttcggaaaaacctgtaagcgacgtcatcggtactggatgcgaccctccctgtactggatacgacgccccctgtaggcgtcagattttcactggtacatgatcagtctcgactcgtttgcaaggcaccgcgccagagctgttgtcgcacgctccaaccgcaacacctataaagcgcggcgaatgccgccagaaaagacacaggagtctacccacatgaaaggttcaccctcgttgttgttggccgccatgctgagtctgccagtcgtggcatacgccgcagaaccggaacagtgcaagaccgtcaacttctccgatgtcggctggaccgacatcaccgtcaccaccgcgaccaccagcgagattctcaagggcctgggctacaagccgcgcaccacgatgatttcggtaccggtgacttacaagtccctggccgacggcaagaacatggatatcttcctcggcaactggatgccgaccatggaaaacgacatcaagcagtaccgtgatgccggcaccgtggaaaccgtgcgcgccaacctggagaacgccaagtacaccctggcagtcccacaggcgctgtacgacaagggcctgaaagacttcgccgacatcgccaaattcaaggatgagctgggcggcaagatctacggcatcgagccgggcaacgatggcaaccgcaccatccagacactgatcgacaaagatgccttcggcctgaaaaccgccggcttcaaggtggtcgaatccagcgaagccggcatgctctctcaggttgaacgcgcttccaagcgcaaccaggccatcgtgttcctcggctgggaaccgcacccgatgaacacccgcttcaagatgaagtacctgaccggtggtgacgactcgttcggccccaactacggccaggccaccatctataccaacacccgcaaaggctacacccaggaatgcagcaacgtcggccagttgctgaagaacctggtgttcaccctcgacatggaaagcaccctgatgggtaacgtcctggacgacaagatgaaggccgacgctgccgccaaggcctggctgcaaaagaacccgcaagtgctcgacacctggctcgccggtgtcaccaccgttgatggcaaaccagggctcgatgccgttaaagcttacctcgccaaatagcacccgctgaccccaggccggtgcgctggcctgggatgttttccccttcgcatgtggacattcactaccatgctgactgaacagaaaatcccactaggccagtacatcgctgccttcgtcgactggttgacccaacacggtgccaactacttcgacgcaatcgcatcgacactggaaacgatgatccacggcgtgacgtttgcgctgacctggttcaatccactggcattgatcggtctgattgcgctgctggctcactttattcaacgtaaatggggactgactgtttttgtcatcgcctccttcctgctgatcctcaacctggggtactggcaggaaaccatggaaaccctcgcccaggtgctgttcgccaccctggtctgcgtggtcatcggtgtgccgctgggcattgttgccgcgcataaaccgatgttctacaccatgatgcggccggtactcgatctgatgcagaccgtgccgaccttcgtctacctcatccctaccctgaccctcttcgggctgggtgtggtgcctgggctgatttccacggtggtgttcgcgattgccgcgccgatccgcctgacctacctgggtatccgcgatgttccgcaagagctgatggacgccggcaaggcctttggctgctcgcgccgccagttgctctcgcgcattgaactgccccacgccatgccgagcatcgccgccggcattacccaatgcatcatgctgtcgttgtcgatggtggtaatcgcggccctggtaggcgccgacggcctcggtaagccggtggtcaacgcactcaacaccgccgatattgccttgggctttgaagcgggcctggccattgtgttgctcgccatcatgctcgaccgtatctgcaaacaacccgacgctaaagtagggggtgatgcatgagcattatccgattcgacaaagtcgacgtgatcttttccaaagacccacgcgaagcgctcaagctgctggaccagggcatgagccgtaacgaaatcctgaagaagaccgggcagatcgtcggcgtcgagaacgccagcctggatatcgagaaaggcgagatctgtgtgctgatgggcctctcgggctcaggcaagtccagcttgctgcgctgcatcaacggcctcaataccgtcagtcgtggccagctgtttgtggagcatgaagggcgtcagatcgacatcgcctcctgcacccccgccgaactgaaaatgatgcgcaccaaacgcatcgccatggtgttccagaagttcgccctgatgccttggctgacggtgcgcgagaacatcagcttcggcctggaaatgcagggccgcccagagaaagaacgacgcacactggtggacgagaaactcgaactggtgggcctgagccaatggcgcaacaagaagcccgacgagttgtccggtggcatgcagcagcgcgtcggcctggcccgcgccctggcgatggacgccgatatcctgctgatggacgaacccttctcggccctcgacccgctgatccgccaaggcttgcaagatgagctactggaactgcaacgcaaattgagcaagaccatcgtgttcgtcagccacgacctggatgaagcactcaagctcggcagccgtatcgcgatcatgaaagacggcaagatcatccagtacagcgtgccggaagagatcgtgctgaacccggcggacgactatgtgcgcaccttcgtcgcccataccaacccgttgaacgtgctgtgcgggcgcagcctgatgcgcaccctggataactgcacgcgtgtgaatggttcggtgtgccttgatccgggtggcgactcctggctggacctggcggaaggcaacaccatccggggcgcacgccagaatggtgtgacgatgaacctgcagaactgggcgccagggcaagccgtggaaggcttgggtcgcgtaccgaccctggtggactcgaacatcggcatgcgcgatgcgttgcagattcgctaccagacaggcaacaagctggtgctgcacgacaacaacaaagtggtggggattttgggagacagtgagctctaccacgctctgctgggcaagaacctgggttgactgctaaaggaatgcggtcaatgtgggagctggcttgcctgcgatagcaagggtgaatccaacatagctatcgcaggcaagccagctcccacattcgaccgcattcaatgcttgcaacagcggcgccagtgaaggcgccgccagctcaactatcagctatagacccggccaaggagctgccgatggctttcaaactgatcgagcacatcccgggtgatctgctcctgggtgaagcccatcaggtcatactcctgaggcccgttgtgcaggtacacctcggcacggtagtaacgggtgcgctcttcttcaggcaggtcagccggcgccgccgagtagccatccaggctcacttcgtagacaaacgggttgccttcgtccatctcgatccgcacgccgatgcagcgtttggatttgcccagcaaggtctgcacttccaggccctgatcacgcaacgcagtcgcagcttcttccaacgccggcgttacgtgtttgtccataaagcgctgcacggtggcctggctcggttgcaggtccagggcgctcaaacgctcgctgaaaccacgacgcccgcgttcagccaattgcgcctgctcctgttcgatggccacgtcttggcgcatggccttgtgcaaaccgaacataaagaacaccagcaccaccgagaacggcagccccgccagcaccaccatggtttgcatggcttcgaagttaccggcaaacagcaggccgatggtcaccagggtgatcaccgccgaccagaagatacgcaaccagtgcggcgcgtcttcatccacgttgccgcctttgcaagaaaggttggccatcatcaccgcgccggaatccgctggtgtcaggaacaacacgaagcccacgaagatcgacacgccgatcactactttcgacgcggggtaatgctcaagcagttggtagatggccatggacggttgctccagcgccgtcttgcccaactccacggccccatggttcaacaccaaatccagggccgagttgccgaagatcgacagccacgccagggtaaagcccaacgggatcagcaatacgccagccaccagttcacgcacggtacgcccacgggaaatacgcgcgatgaacatgcctacaaatggcgcccaggaaatccaccaggcccagtagaacagggtccacaggcccatccagcgttcggtcttggcaccgtcgccttcgtacacatacaggtcgaaggttttgagcacgataccgttgaggtaatcaccggtgttctgcaccaggccattgagcaggtgcaaggtagggccgaacaacagcacaaagatcaacaaaccgctgaacagcacgatgttgaggttggagaggcggcgaataccgttttccacacccgacacggcagcgatggtcgccacggtgctcatcacgatgatcacgatcagcaggttggtgttgctgtgctccatgccgaacaggttttccagccccgacgacacctgcatcgagccgatccccaggttggtcaccagacccagcagggtcacgaacatgccgaaaccgtctaccgcatggccggcggcgcccttcacccaacgctcgcccaccagcgggtacagcgccgaacgcaaggccagcggctggttgtggcggtaggcaaagtacgccacggccaggcccaccagcgcatagatcgcccagccgtgcagcccccagtgcaagaaggtcagttgcagcgcctggcgtgccgcgccattgctggcggcagcgccttcgggcgggttgaagtagtggtccaacggctcggacgcaccgaaatacaacagcgagatgccgatacccgacgagaacaacatgccggcccaggcgccgtagctgaagtctggggtatcgtccttcgcacccagcttaagtttcccataggacgaaaacgccaggccgaccacaaacaccaggtaggcagcgatgaccaccatgtagtaccagccaaagcttttcgacagccaggcctgtgctacgccgagcaggcgcccggcctcctgcggggcgacgatcagaatggcggtcaacaataaaatcagcgcggtggaggtgtagaacacccaaccgttgacccgaaccttttccggtggggtctttataagagaggcagaactcatggcgcagatgctccaggcagtgcgagagagaaacacaaggcaacggttatcccgggacatcgatttttcggcagtcgacggacgggtgttataaagacaccccaaaattcttgagcccgccaaggcggtgatcaggctctgaagtggcctgtttcaagggtttttgcaggtgtcgaaggttgcagctcgcaggtaggaaacatctgtaggcagcgaccatttgtcgcagatcttattctttgttgattgaacgttcaatcaaaacaaaatagactggccctcaagccgacggacgtggatcgcccatcggcaggcctaaggagaggtgctacatgcccaaggtcggtatgcaacccatacgccgccagcagttgatcgaagccacgttgacggccattgatcgggtcgggatgggagatgccagcattgcgctgatcgcccgtctggccggcgtctcgaacggcatcatcagccactactttcaggacaagaacggcctgatcgcagcgacgatgcgctacttgatgaatgcgctgatcgagaacgtgcaagaacgcaggcgtgccttgaaggatgacagcccacgggcgcaccttcaggtgatcatcgaaggcaacttcgacgccagccaggtcagcggcccggcaatgaaaacctggctggccttctgggccaccagcatgcaccacccgtcattgcacaggttgcagcggatcaacgatcaacgtctgtattccaacctgtgctgccagttccgccgagtgctgccgctgccgcacgcacgcaaagcagcccgaggcctggcggccctgatcgacggtttgtggttgcgcggcgccctgtcgggagacgctttcgacacggagcaggcgcaacggatcgcttacgaatacatggatttccaattggccaagcaggtgagttagagcacacataaccgctcaacccctgaacgtccgccgctcagtgttgccacacccccatggcccactgttcggcgggtaacgccaaccacttatgcacttgcgaggactttatggcccgtttcgacctgcaaaaactctacattgacggcggctacagcgacgctggcagcgatgccaccttcgaagccatcaacccggctaacggtgaagttctcgcccaagtgcaacgcgccaccttcgatgacgttgaacgtgccgtggtcagcgctgaaaaaggccagaaaatctgggccgccatgaccgccatggagcgttcgcgcatcctgcgtcgtgccgtggacatcctgcgcgagcgcaacgatgagctggccgccctggaaaccctggacaccggtaaagctttctccgaaaccaagtacgtcgacatcgtcaccggtgctgacgtactggaatactacgccggcctggtgcctgccatcgaaggcgagcagatcccactgcgcgacacttcgtttgtctacacccgccgcgagccattgggggtggttgccggtatcggcgcgtggaactacccgattcagatcgccctgtggaaatccgcaccggccctggctgccggtaacgcgatgatcttcaagccaagcgaagtcacctcgctgaccaccctgaaactggccgagatctacaccgagnnnnnnnnnnnnnnnnnnnnnnnnnnnnnnnnnnnnnnnncgtgaagtcggcacctggctgaccgagcatccgcgcatcgaaaaagtctccttcaccggcggcaccgacactggcaagaaagtcatggccagcgcgtcgagctcctcgctcaaagacgtgaccatggagctgggcggcaagtccccgctgatcattttcgacgacgccgacctcgaccgcgccgccgacaccgccatgatggccaacttctacagctccggccaggtctgcaccaacggcacccgcgtgttcgtgcccaagcacctgcaagccgcgttcgaagccaagatcgttgagcgtgtggcgcgcatccgcatcggcaacccggaagacgaaaacaccaacttcggcccgctggtcagcttcgcccacatggaaagcgtgctgggttacatcgccaaaggcaaagagcaaggcgcacgcctgctgtgcggcggcgaccgcctgaccgacggcgacttcgccaaaggcgccttcgtggccccgactgtgttcaccgactgcactgatgacatggtgatcgtgcgtgaagaaatctttggcccggtgatgagcatcctcacctacgaaaccgaagaagaagtgatccgccgcgccaacgacaccgacttcggcctggccgctggcctggtcaccaaggacctgaaccgcgcccaccgcgtgattcaccagttggaagccggtatctgctggatcaacgcttggggcgagtccgacgcgaaaatgccggtcggtggctacaagcagtcgggtgtgggccgtgagaacggcatcagctcgctgaacaacttcacccgcatcaaatcggtacaggttgaattgggcgattacgcctcggtgttctaacaccagcgagtcttgtattgcccgtgaggccatcgcggcggtgcgacgactcgacaagcccggctcccacatttgctctgtgtgaacccgatcaaatgtgggagctggcttgcctgcgatcgagtgcgaagcactcgccagacctgaccacacttcaaagagggtacattcatgtcccaagaatacgattacatcattgtgggtgccggctccgccggtaacaccctggcgacccgtctgaccgaagacgaaggcgtcaccgttttgctgctggaagccggtggcccggactaccgcctcgacttccgtacccagatgccagccgccctggctttcccgctgcaaggccgccgctacaactgggcctacgaaaccgatccagagccacacatggacggccgccggatggagtgcggacgcggcaagggcctgggtggctcttccctgatcaacggcatgtgctacatccgtggcaacgccatggactatgacaattggtcgaagctgccaggcctggaagactggacctacctggactgcctgccgtatttccgcaaagccgaaacccgcgacatcggccccaacgattggcacggtggcgacggcccggtcagcgtgaccacgccgaaagcgggcaacaacccgctgttccacgccatggttgaagcaggcgtacaggccggttacccacgtaccgaagacttgaacggctaccagcaagaaggcttcggcccgatggaccgcaccgtcacgccgaacggccgtcgcgccagcaccgcacgcggttacctggacacggctaaaaagcgttcgaccctgaccatcgtcacccatgccctcaccgacaaagtactgttcgaaggcaagcgtgccgtgggcgtgcgttacctgatcggcgccgccgaagagcgcgttgaagcccgtgcgcgtaaagaagtgctggtgtgcagcggcgcaatcgcttcgccgcaactgctgcaacgctccggcgtcggcccggccaaattgctggaaagcctcgacatcccggtggtccacgacctgccgggcgtgggtgaaaacctgcaggaccaccttgagctgtacctgcaatacgcgtgcacccagccagtgtcgctgtacccctcgctgctctggtacaaccagccggcaattggtgccgaatggctgttcaacggcaccggcatcggcgccagcaaccagttcgaagcgggcgggtttatccgtacccgcgaagaattcgagtggccgaacatccagtaccacttcctgccggtggcgattaactacaacggtagcaacggtgtgaaagagcacggtttccaggcgcacatgggctccatgcgttcgccaagccgtggccgtatccagctgaagtcgaagaacccacgggactacccgagcatcctcttcaactacatggccaccgagcaggactggcaggagttccgcgatggcatccgcctgacccgcgaaatcatgcagcagccggcactggacccgtaccgtggccgcgaaatcagcccgggcatcgacgtgcaaaccgatgagcagttggacaagttcatccgcgagcacgccgagaccgcgttccacccgtcctgctcgtgcaagatgggcaccgacgagatggccgtagtcgatggcgaaggccgcgtgcatggcatgcagggcttgcgtgtggtcgatgcctcgatcatgccgatcatcactaccggcaacctgaacgcgccaacgatcatgatcgccgagaaaatcgccgacaagatccgtggccgccagccgctgccgcgcagcaccgctgactactacgtagcaggcgatgcgccggtgcgtggcaagcctatgcgtgaagtagggccattggcgcagtaaccgaaacaccccagtgattgatcgttcccacgctccgcgtgggaacgcatcctgtgatgctctgcgtcacgcccttcaagagcggacgcagagcgtccagggtggcattcccacgcagagcgtgggaacgatcacacaacaaaacctcccttgatcagctccccgcccaggcctactctgttggcctgcccgcgccgagccgcccacaaggaaggccccatgttcgaacaccacgccacgctcaagaaacacttcagcgccctgcgcaccaccgccgaatttttctccctgcgctacgtacgcgaatccggccagtacctgtcggtgcgcaagaacgtcgccgagccgcctcacctgggccatgacgaaggcgcgatgctcaccgtgcgtctcaacggggtagaagcctacgccgcgaccaacgatatttcccttgccggcctgcaagccgcccttgagcgtgctgaacagcaagcccggttgatcaagccccacgccctgctcgacctgcaccagcagccggtgtccagcgacgtcgccgactacctgtcgcccgacctcgaccagcccttcccatccctgagcgactgctaccaattgctcggcgatgagtccgccgccgtgcccaaggatgagcgcctggtgagctgggaagtcagcctgggaaccacgcgggtcgaacagatctacctcaacagcgccggcgcgcaattgcgtcaggcccagcgtttcgtgttccccggcctgagcgtgaccgccttcgacggcaacgacagccagacccgcaccctgggcggtaccaacttcggccagcaaggcagtgccggcgtgatccagcgctttggcctggtgggcgccgcccgcaaggtggccgacgaagccctgcaattgctgctcgcaccgaatacgccccacggcccgcgtgacctgctgctgatgcccgaccagatgatcctgcagatccatgagtccatcggccatccgctggagctggatcgcatcctcggtgacgagcgcaattacgccggcaccagttttgtgaaagccagcgacttcggccacctgcaatatggctcaccgctgcttaatgtcaccttcgacccggacatccccgaacagcttgccagttacggccatgacgacgacggcacgcctgccagcaagcaatttctgattcgcgagggcctgctgctcaaacccttgggcggggccttgtcgcaatttcgcgccaacctgccaggcgttgccaacagccgcgcctgcggctggaaccgtgcgcccatcgaccgcatggccaacctgaatatcgagcctggcgataaaagcctcgcgcaactggtgggcggcatcgagaacggcatcctgatgtcgaccaaccgttcgtggtccatcgacgatgcgcgcaacaagttccagttcggctgcgagtggggccagttgatcgaaaacggcgaactcaagggcgtggtgaagaaccccaactaccgggcgatttccgcgcagttctggcgcaagctcagcgcggtgggcgacgccagcaccttcaaggtgttgggcacgccaaactgcggcaaaggcgaacccaaccaggtgatccgcgtcggccatgcgtcgccggcctgtgtattcagcaatgtcgatgtatttgggggagatgcctgatgaaccacttcaaggcactggtggactggctcaagcaggcggtcaccgatcaagaacaatttcacctcggctacgcggatgaagcgtccgagttcgtgcgcttcaaccacgcgcaggtgcgccaggccggccaggtacagcaggccagcctgaacctcaaattgatcaacgctgggcgccacgccgacctgggtatcaccctgtcgggcgaagcggagctggatcgccagcgcctggcgaatggcctgcaacaactgcgcgaaaccttgccgctattgccgcctgacccgtacctgctgttgaaccccgacgcctggcacaaccataacgaacagctgcgccccctgccggaactggcccaggtgctggacgatatcagccaggccgccgacggcgtggacctggttggcttctacgccgccggcccgatcagccgtggtttcgccagctcaacgggggcgttcggctggtaccgggctaacagcttcaatttcgacttcagcctgttccacgccaatggcgaagcggtaaaagccagctacgccgggcacacctggaacagcgccgaattcgccgcgcgcttccaacaggcccgggagcaactggcgtttctcggtcgcccgctgcacaccctggcgcccggccaataccgcgcctaccttgcgccggcagcgctggaagaaatcatcagcatcatcacctggggtggtttttcggcccaggccatcgccagcaaaggcagttcgttgcaacgcctgtacgcgggtgatcagttactgagcccgctggtgacggtggatgagcagatcagcggctccctgagccaggcgttttccactgaaggctacccgcgtgaggatgtcactctgatcaacgcaggcaaggccgagggccagttggtcaactcgcgcagcgccgccgaatacggcttgagcaccaacggcgccagcagcgacgagtcgcccagcgccctgcaaatggcggccggcagcctggcccaggccgatattctcaagcagttgggcaccgggctgtatatcagcaacctctggtacctgaactactccgacctgccggcagcgcgcctgaccggcatgacgcgctttgcgaccttctgggtggaaaacggcgagatccaggcgccggtcagcaccatgcgctttgatgacagtgtctatcagttgctcggttcgcaattggaagcgctgactgctgatcgggagctgctgttgtcggccagtacctatgaccagcgcaacaccgcttccaacctgttgccaggcgctttggtaaaacgcctgacgctgaccttataaaccgtaggagcgagcttgctcgcgaagaacttacagataccgccggttggctatcagcactgcgttatcgttgacgtttttcgcgagcaagctcgctcctacagagcaataacctgcactgcaaagaaacgtctatcccgccacccctgcccacgagagcataaccttgcctgggaaaggcaagctggagtcttgagatgaaccatggaagttttgtcattgagaagttgtacaagcactacaacgttcacgtagagcaactgggtaacgacccgcacagaaaaaccgtactgatggttaacggcgcgctatccaccacgcgctcctttgcccgtaccagcaaatgcctggccgagcacttcaatgtcctgctgttcgacttgccattctctggtttgtcgcgcgagcacaacaccgaactcgacctggtcaccaaggacgacgaagtgcaaatcctgcgggccttggtggcgcgtttcaaagtcaatcatctggtctcggcctcatggggcggcatctccacgctgttgaccctggcgcacaacccgccctccatcgaaagctcggtggtgatggccctggcgcccaacctcaaccaggcgatgctggaatatgtcgagcgcgtgcgtgtgctgatcgaggctgatgacaagtcggcggtcggccatctgctcaacgaaacggtgggcaaatacctgtcggcgcgcctcaaacgcaataaccatcggcacctgtcgaccatggccaccaccgagtaccgccaggcgcgctttcatattcatcaggtgctgagcttgggcgatggcaactacttgccggcgctcaagcagattgaaacaccagtacactttctcaacggcgcgctggacgaatacaccccggccgacgaggcccagctgttcaaacactatgtaggccgcagcagctttgccgtggccgaacacaccggccatctgctggaccttgaatcaccggaagcggcgtttgcagtgcaccgcgtcttggtggattttctagtaggagcgcatgccgcgttatcggctttaaccgaaccagcagtgggaaaaatcccaagggttagcgcataatcgccaacacatagcctgctaataaaaagggatcccatgccgaatcgtgcccctctcgatgccaagaccgcccgctggctcccctgggtggtagcgattgccttcttcatgcagtcgctggacgggacgattctcaacaccgcgctgccggcgatggcccaggacctcgcggaaaacccgctgcgcatgcaaggggtggtgatcgcctacatgctcaccgtggccttgctgattcccgcctcgggctggatcgccgaccgctttggcaccaagaagatcttctttggcgcgatcatgctgttcagcatcgggtcgttgctgtgtgcgctgtccagtagcctgagcatgctggtgggcgctcgggtggtccagggcctgggcggtgcgctgatgctgccggtcgggcggctggtggtgctgcgggcttatccgcgctccgagctggtgcggatcatgggcttcatcaccattcccggcctgctcggccccttgcttggcccgacgatgggcggctggatggtgcaatacctgacctggcactggatcttcctgatcaacctgccggtgggcatgatcggctgctatgccgtgtggaaattcatccccgatctgcgcggcagcgagcgcacgcgctttgacggcctgggcttcctgctgttcggcgcggcgatggtgctgatcaccatcgccatggagggcctgggcgaactgcacctgccgcacctgcgggtgatgttgctgttgttcggcgggcttgcctgcctggcggcgtactggctgcgcgccgggcacatcgataacccgctgttctcgccggtgctgttcaagacgcgcacctttgccgtggggatcctcggcaacctgtttgcgcgcctgggcagcggcgcactgccgttcctggtgccgctgttgttacaagtggcgctgggctattcgccgtcagaagcgggcatgagcatgctgccgctggcggcagcggcaatgttcgccaaatccatcgcgcgccctcttatcgaacgcctcggctaccgcatcgtcctgaccggcaacaccctggccctgggcctgatgctggcgagcatgggcctggtcagcgaacaaacgccctacccgctgctgttggccatgctggcggtactgggggccatcaactccctgcaatttaccgccatgaacaccgtcaccctgatcgacctcgacgacgcccaggccagcagcggcaacagcttgctgtcggtggtggcgcagttgtccctgagcctgggcgtggcctgtgccggtgcattgctcggcggctttaccgccgaagccggcaatgacggggtcaatacggtgctgggcgcctttcaactgaccttcctcaccgtgggcatcatggcgatgctggcggcggcgatcttcctgcaactgtcgcccaaggacggcaaacgcgtggtcagccgcgagcacgatatcgagcactaacgggcgtctcgtcgagaacttgcgaggaaaatcccacgagactggtacactgcgcgacattttgttttgcagagccagtcccgtgactaccatcgccaccgcttttaatactttgcccctctccgccgccatgctggctaacctcgactcgctgggttatgtcgagatgacgcagatccaggcgcaaagcttgccggtgatcctcaaagggctggacctgattgcccaggccaagaccggcagcggcaagaccgctgcattcggcatcggcttgttgaacccgatcaacccgcgctacttcggttgccaggcgctggtgatgtgcccgactcgcgagctggccgaccaggtcgccaaggaaatccgtcgcctggcccgcgccgaagacaacatcaaggtactgaccctgtgcggcggcgtgtccctcggcccgcagatcgcctccctggagcacggcgcccacgttatcgtcggcacgccgggccgtatccagcagcacctgcgtaaaggctcgctggtgctggacggtttgaacactctgatcctcgacgaagccgaccgcatgctcgacatgggcttctacgacgccatcgaagacatcatcagcaagaccccgccgcgccgccaaaccctgctgttctcggccacgtacccagtgagcatcaagcagctcgcttccaagttcatgcgtgcgcctcagcaagtgaaagccgaagcgttccactccgacgaccagatcgaacagcgcttctacgagatctccccggaagagcgcatggacgccgtgaccaaggtgctggcgcacttccgcccggcctcttgcgtggcgttctgctttaccaagcagcaagtgcaggaaaccgtcgaccacctgaccgccaagggcatctccgccgttggcctgcatggtgacctggaacagcgcgaccgtgaccaggtactggcgatgtttgccaaccgcagcacctcggtgctggtggccaccgacgttgccgcccgtggcctggacatcgacgccctggacatggtgatcaacgtcgaactggcccgcgactcggaaattcacatccaccgtgtaggccgtaccggccgcgccggcgaaaccggcatcgccatcagcctggtggcgccgtccgaagcccaccgcgcccaggccatcgagcaactgcagaagtcgccgctgaactgggaccaactggacaacctcaagccgcaaagcggtggcccgttgttgccgcagatgagcaccctgtgcatcgccgccgggcgtaaagacaaggtgcgcccaggcgacatcctcggtgcgttgaccggtgaagctggcattccgggtgcccaggtcggcaagatcgcgatctttgatttccaggccttcgtggccgtggagcgcggcatcgccaagcaggcgttgcagcgtttgaacgacggcaagatcaagggccgttcgctgcgcgtgcgtattttgtaataacaccgagttcccattgcaggaaccgaatcaatgtgggagctggcttgcctgcgatagcgacggtgaatccactaccgctatcgcaggcaagccagctcccacagggttgatggcatttcaaatcaatagttttgtgaggacatggctgtgcgctcgaccgaagttgtgatcattggcgccggcgccgcaggcttgatgtgcgcgctgaccgccgccgggcgtgggcgtaaggtgatgttgatcgaccatgccaacaaggccggcaagaagatcctgatgtccggtggcggccgctgcaacttcaccaacatgtacaccgagccggccaatttcctctcgcacaacgcgcacttctgcaaatccgccctggcccgttatacgcagtgggattttatcgggctggtggccaaacacggcgtgccgtaccacgagaagaaactcggccagctgttctgcgacaacaagtccagcgacatcctcggcatgctgctcgacgagtgcatccaggccggcgtgagcctgcacctggacacctccatcgaggcaatcgccaagctcgaaagcggctatcaactgcaaaccaccctgggtgaactgcgctgtgaatccctggtgatcgccacgggcggtttgtcgatcccgacgctgggcgccaccggcttcggttaccaagtggccaagcaattcggccacgaactgctgccgacccgcgccgggctggtgccgttcaccatcaccgaccagctcaaggagttgtgcggcgagttgtccggcacctcggtcgactgcctggtgagctgcaacggccagagctttcgcgagaacatcctgttcactcaccgcggcctgagcgggccggcaattttgcagatttcctcgtattggcactccggcgacacggtggaaatcaacctgctgcccgaccacgacgcccatgcctggctgcaacagcaacaggccgaacaccccaacagcgagttaaaaaccctgctgggcgagatcttcaccaagaaaatggccaatctgctggctcaaagctggttcgaatccaaaccgatgaagcagtacacccacgctgaaatggccgatatcgcgcaaaagctggggagctggcaactggtaccggccggcaccgagggttatcgcaccgccgaggtgacattgggcggggtggatacgcgggaagtgtcgtccaagaccatggaatcgctgaaaagccccggcctgtactttatcggcgaagtgctggatgtgaccggccacctgggcgggttcaatttccagtgggcctgggcctcgggctacgcggccgcgcaatacgcctgacttgcaccttgaaatgcaatcccctgtgggagctggcttgcctgcgatagcggcgttgaatcccacattgttatcgcaggcaagcccacattggttttgcagtgttactgaacattttgctgtccgatgtgatcgccacgcttgccgtggcgtcattactggctcaatttagcgacaacgtcccggaagactccagacttcatgtcatcgacctcgttcaagcagtccatgcggcgcctgtgggcgctggataaattcagctacagcgtacgggtgttcatcgccctcaccggcagcatggcgttgtgttggtaccaggatgaaatgacgctgctgatcccgctcttcctggggattatcgccagcgccctggccgagaccgatgacagctggcaaggccgcctcaacgcgctggcggtgacactggtgtgtttcagcattgccgcgctgtcggtggagctgctgttcccttacccctggatatttgccatcgccctggccctggccagtttcggcctgaccatgctcggcgcactgggcgaacgctatggcgcgattgcctcggccaccttgattctgtcggtctacaccatgatcggcgtggaccagcgcggcggcgccgtcacggatttctggcatgagcccctgctgctggtcgccggtgccgcctggtacggcgcgttgtcggtgctgtggcaggcgctgttttccaaccagccggtgcagcagagcctggcgcggttgttccgcgagctggggcgttacctcaagctcaagtcgtccttgtttgaacccatccgtcagttggacgtagaagcgcgacgcctggaactggctcagcaaaatggccgagtcgtcgctgcgctgaatgccgcgaaggaaatcatcctgcaccgcgtcggcaatgggcgtccgggctcgaaggtcagtcgctacctgaagctctacttcctggcccaggacattcacgagcgcgccagttcctctcactacccctacaacgccctcactgaagccttcttccacagcgatgtgctatttcgttgccagcgcttgctgcgccagcaaggcaaggcctgccagaccctggcagagtcgatccaactgcgccaaccgttcatctatgacgatagctttgcccaagccctgggcgacctcaacgcgtccctggagcacctgcgcatccagagcaacccggcctggcgtggcctgctgcgttcactgcgcgccttggcggccaacctgtccaccctcgaccgcctgctgggcgacgccagcaatcccgatgccctggccgacgccaccgacagcaatctgctggaccgcgccccgcgcaacctcaaggaaatgtggacgcgcctgcgcacccaactgacgcccacctcgctgctgtttcgccatgccctgcgcctgtccctggcattgaccgtcggctacgccaccctgcacgccattcacgcgtcccagggctactggatcatcctcaccaccctgttcgtgtgccagccgagttacggcgccacccggcgcaaactcggccagcggatcatcggcaccgccatcggcctcaccgtggcctgggcgctgttcgatctgttccccaacccggtggtgcagtcgatgttcgctatcgccgcaggcctggtgttctttatcaaccgcaccacccgctacaccctggcgacggcggcgatcaccttgatggtgctgttctgcttcaaccaggtgggcgatggctacgggctgttcctgccgcgcctgttcgatacgttgctcggtagcctgatcgcgggcctggcggtgttcctgttcctgccagactggcaaggccgacgcttgaacaaagtgctggccaacaccctgacttgcaacagcatctacctgcgccagatcatgcagcaatacgccgccggcaagagcgacgacctggcttaccgcctggcccgccgcaatgcccacaacgccgatgccgcgttgtccaccaccctggcgaatatgctgatggagccggggcatttccgtaaggaagccgacgtgggcttccgcttcctggtgctgtctcacaccttgctcagctacttatccggattgggtgcacaccgcgatactcagctaccgaccgacgtacgcgagcacttgatcgaaggcgcgggcaacagcctggcggcgagcattgatgagatcgccaccggcctggccaacaaacactcgattgcgatacagagcgatgccgaggaagcgctggcagccgagcttgagcaaatgcccgatgaaatcgacgaagggcagcggctggtacagacgcagttggcgttgatttgccggcagttggggccgttgcgtacgttggcggcgcatctgatcaaagataccggcgcggcttaggccgctatcgcaggcaagccagctcccacatttgaccgagttccaacataagaatgcgggcaaaatgtgggagccgggcttgcccgcgatgaggcccgcaagcacgctacatcccatgcgccttcatcaaccgcgcataactgccatcagccttcatcctggcaatctcccgatcaaagctggcgacaatctgcgcatgctcggggttcttcaaactgaccagaatatgcaggctgttctcgctcagcggcttgcccacaaacgccacggtattgcgcacccgcggcgactcccgagccaggtaataacgcgccacgtattcgtcttccagcgtcaaccgcacccgccgcgccgcgagcatgcgcacggccatggcgaagttgtgcacgggtactttctgtagctgggtgtcttgatcgaacgccgccgaataggcataaccgcgtaccacggcgatggtctcgtcgcgcagttgggccaggctttgataagcgatgtcatcgtcgctgcgcttgagaaagcgcacgcggttaagcaggtactcagcagaaaactggccaaactgcgtgcgggcctcgtcgtaccaggcgttgatcagcacatcgtagcgcccatcccccacgcccttgagcgcgcgagcccaaggcacctgttcaaaatcactggcgtaccccgcacgggccagggccgtgctgacgatatccgtggccaggccgccattgatcaaggtggcatcggtgaacggcggccagccatccgccactagacgcagacgctgtgccagcaccggctgggccagcaacagcactgcgatcaaagcaacggcacgagtcaatcgcggcatgctcaaagtccttggcgggcaggcggtggcctgataacagtagctcatcaataagcttgcattgcagattacacaaagcagccaacggcgcacgcactgaatgatggcaaattgacgccattcacacatttgtcaattttagacagcggtgcccgtcacgcttactatccaggtacgtctttatcagagcacacatcatgacggttgattgggtttgtaaacatcacaacgacttgggcaaggaccagctttacgccctcctgcgcttgcgcagcgaggtattcgtcgtcgagcagaaatgcgcgtatcaggacatcgacgggcaggacctggccggggacacccatcacctgatggcctggaacgataatgaactggtggcttacctgcgcctgctggacccggagtcccagggcggcgatgtggtgattggccgcgtcatcgtttcgccggcagcgcggggcaccgggctggggcatcaaatgatggaagaggcgcttgagcgtattgaggatatctggccgcaaacgccgatttttctctcggcccaggcgcacttgcagaagtattacgggcggtatgggtttgtggtggcgggtgaggaatacctggaggacgatattccccatatcggtatgcgccgcctctgagggcgccatcgcaggcaagccagctcccacattggaacgcattcaactgtgggagccgggcttgcccgcgatagcgtcagccctgccaccgctaaactcagggatagcccaacacctgcttgatcgacgccagattagcctcgatccacccccgatcaatcgccccccaattccgaatccgatagcgcccggcatggttacgcgcaccgtcctcctgctcgaattcacacacaatatccaggtcggccaacgccgcaatcgtatcctgggcagtgcgccggggcatgcccgtggcctcggtcaacgccggaacgctgctggccagttggctgtcgatcaggtacgccacgtacaggcggcggtagaagctgcttttggtcttgctcacatccatggtcagtcgccttggggttagggcttgccctgcaaatcacgccaggtgagatacacacgcaggtcgaattccacctgatggtagcccggcatcatgtattggcagagtttgtagaacgccttgttgtggtccgactccttgaagtgcgccagctcgtgtaccacgatcatgcgcagaaactccggggccgcttccttgaacagcgaagcgatgcggatctctttcttggacttgagattaccgccctgcacccgggaaatcgtggtgtgcaaacccaaggcacgatgggtcaggtccaggcggttgtcgaacagcactttgtcgatagacggcgcgttacgcaggtgctcctgcttcaaggccagggcataggcgtacagggccttgtctctctgcaccgcatggcgttcggggtaacgctgttccaggtacgcacccaactggtccttggcgatcagttggcgcacttgctcctggagcgcggcggggtaggcctggaggtatttcaacgcggtcatgggctcggcaacgcaattgggacgggcgccagtgtagcgaattcaaagcgtgcgagggtacgaccagccggcaacgtcttcggccatcaacggcagcgccgcccacggcccctggatatacgcgcagccattggcctttagccactgtgtttgctcaagggtctccacgccttcggcgatcaccagcacaccaaaatgctcacacagttggatgatgctgcgcgccatcgccgcatcccgcgccgagccaggcaggcgcgccaccagttgagggtcaagtttgagggtatcgaacttgaggtcgcgcaaatgagccagggagcactggccgcagccaaagtcgtccagggcaatccgcaccccgatccggcgcagtaactggagttgcttggtagactctgcaagattactcatcaagcagtcctcgccgatttccacctccagttgccgcccctctaacccatgccgctccagcacctgctgcagttggttagccaggttgggcatgttgaactggctgctgctcaggctcacgctcaacaccagttcggggtcgaaggtagcttgccaagcctggcgctgggcggcgacttgctggtagatccaggcactcaactggttgatcaaccgcgcctcttccagcagcggcaagaacaggcccggcggcacatcgccgacgctgggatgttgccagcgcaacagcgcctcgacgccgcgcaaacgcccgtcttccaggcagacctgaggctggtacaccaaagtgaaatccttgttggcaatggcggtacgcacactgtcttccagcatcagccgcgagcgggcgcggccgttcatttcctggtcgtagtaacgatactgctggcggccggcgcgcttggcttcgtacatggctatatccgccgcccgcagcaggccgctcaagtccgagccgcaatccgggaacgtcgcgatgccgatactgaccccaagcatcacctccaacccatcgacctgctggcacacagacacccgttcgatgagcttttccgcgatcttcgcggcctgctcgggaaactccagctccagcaacgcggtgaattcatccccacccatgcgccccagaatgtcgtaggaacgcaggcacgcctgcatttgctccgaaacccaacgcaacacacgatccccagcgtcgtggcccagcgtatcgttgacccgcttgaaaccatccaggtccagatacagcaataccagcgcctgctcgctacgttcgctacgcagcaaggtgttctccatcgcctgatggaaaccgcgccggttcagcagcccggtcagcgggtcggtcacggcctggaattccagttgctgatgcaggtgacgcacttcagacatgtccagcaccgtcaccaccatcgccttctgctccgcaggcaacggcgcgcaggacaacgccaccggcacctgctggccccgaccggtgcgcaaaatggcgtcgtgttggcgccacgtctcgccccggcgatacgcctcgtacatgggaaagcccaaccaggctggcacatggggcttttgcaggaaactgaggaaactctcgccctgcaactcagccatcgttgcattcaacagccgggaaatggccgggttggcgtactcgatcacactggcttcgctcaccaccaaaatgccctcggcggcgttatccagcaccgaggcattaaacgcgcgggccaactccaggtcatggctcaggcgctgcaaggcacggcgattgcgctggtgctccagcaacgcctgcaccttgggcttaaggatatgcgggtcaaagggcttgaacaggtagtcgatcgccccgctggcgtagccttcaagtactgcgtcgggggaatgggcggtggcggtcagaaagataatcggcgtcatgcgcgtgcgctggttgccgcgcatcaggcgtgcgacctcgaaaccgtccatgcccggcatgcgcacgtccagcagcaccaggtcgacgtcatgggccagcagtaactccagggcctccaggccagacgcggcggtgatcacccgccaatcgtcacgctgcaacagcgcacgcatgctgacgaggttttccgggtagtcatcgaccaccaacagaaccgaaattgcatcgtcgtgttgtggagcgccatccatgctacgtctcttccttagggagctacaccggtcacttttgttacaaaggccggataaacactgagggctcactctagccgtggttctaaaaaagcagaagtgacgtgggggccatcattgtgccaaaggccaggaagccgactaacggtaaggccctgtagcccgcggttcacgggcaacatggctttttgacatttcgctgacgccaataaattgccagcaattgtttaacaatctcaccagcaccgcctataaagaacctggaaggccctttgggccaatgccttcaccctctgtaaaaaggccaacgccatgatcgacctttccacctggaacctgagcattccggtcggctccccacccacaaccattgaaacgccaaggctgctgagcggcttcaacgatcaatacttccaggccgaaggcagcgacgtgcagttctggacacccgtgacgggctcgcgcaccgaaaacgccatctacccccgcagcgaactgcgcgaaacctacgccgacggccgcctgcgcaattggacctaccccgaggccgacaacttcctgcgcgccaccctcaccgtcaaccaggtgccctcctccggcaagatcgtgatcggccagatccacgcctacgacagccagaaaccgctgatcaagctcgagtaccaattcaaggagaaaacccagaccggcaacatcgtcgccaaagtgcgcatgcgcccggacgaggccgaaagtcaggtgatcattgtcgcctccaatgtgccactgcagaagagcttcacctatgtgatcaacctcaacaaagccgggctgctcagcgtgtatgccgccgacagcgagtggaatgaacggattggcgcggcctggggcgacaagccgttgtacttcaaggcgggggtgtatgtgcaggacaatacgggcgacaccaatgagggtgcgcgggtgacgtttgcgaagttggatattgatcatgagtgaatcgtcccgcgatgcgcaggatttttcccggataaatctcacaccttaaacaccccgcagccccctgtgggagccgggcttgcccgcgatgacggcgcatcagccactctcctcggtgcctgacacaccgccatcgcgggcaagcccggctcccacattgattgtgcgtcagctcaagtgcggtgtggctcctgcccttgcaccgaaaccgccaccgactaccctgtgctgttgatcgacagcgaagccccactgctcgacctccacgcctgcctgcgcgaacgtctcaacgcggctctggaacacctaaacctaatggcctgttacagcctgccggatttcgccgagcgagacctgaacaacgtggccaataccgcacgtattctggtgcaggacgtgagtgatgtgtttcgagtcattgaaataccgtggtctcgatactttctcggcaagctgaacaacaaaccgcactcttgtgggttttcggcgagcaaaaatcgaccggcagcgttcacctgctatcaaaatcacaaaatcaaaatacgcaatggaatatcgctaataacaaaaaactataaataactgtcaatattcacaggtaccccatcagataaaacaacttactattattttgcagacatcacaaacagtctgcacacgattacaatgatcaccacttttagagagacaaagccatgagcaccgatcgccaaaaatcgtttactgcacgcctatcatataacaactatgctgtttgcttctatgagctctcattatatgcagagccggttactggatatttcagaggtcacttagttacggttgatggcactaagggttttgcaggcctaaagccaagccaatacttatgcttgaacaataaactatacgcaaacgagggtgagctcttgtattttcgctacagagatggcaaatacgtcatctatgttcgtgagcaagggccgcactatggaaaagtgctagatcaatcaaatggttggctattagctgcagaaaacggaatatcattcaacttggtagatccaaataatcataaccaggtactgacgcttgatgatttcccaggcgccaccagcaaggagctttgtatccaaagtaatcgggggctgattcaggactacgactacgtagcatgtgaccactcattctcgcactcctatcttgttacacatggaggaaaaaaatcaattccgtttaattttgagattgtagaaacaaatgtaccttacgtaggcaacccagaagaagtttgaaaaaatatttactttacactcaagcaactataccgagcactttaaaaaacccgcaccagtgcgggtttttttgatttcaatatctcgcctccaccaccgaccgttcaatctaagcgatgtcatacatatataaattttgcgaaaactgctacgaaatactggctctagctgacattacatatgagaataaaggggacgaatttatttagtgcaaggaacagatatatttaacccgaggatatcgtaaccccttctttcaatacgtcgaccattacctgttaaagctacggttttttcacagacctcagtgcaatggttttaccaccggtctgcgtcgcatacccagcgccaccgaatcgtgaagcgccatggcacggcccgcgtcccactctttttgcatcgttgaaaaaagctcactatccattcgcgcctgatgcgcactcagcgcctgggacatggcctcggcgatgcgttcaataatgacacctggggctgcgataccacagtgcttgcgtccgaactcaatcagctgttgacgatcggggtacgccttcactttgttcattttgatggccaggctacggtcaaccaatgcctggccggattttggattgtaatgctcataggcggtggtcgttgtcacatcgaacacaggcgccaattgcaccgtttcgagggctcccggatgggtatagagcacgccgaaatttttcaagtgggcatcgccattgcgcaccatgactgacaagcaaacagaggaaaaaaagcgttcaagttcacgcagtacatcgccctgctggcacacctggcgaatcactgcagcgagcgtttcgtagctttgggaatacttgtagttgtcgtgggggtccttgttcagccccagcagcaccgccatgtcttcgaaccccaacctgcccgagggggtcagatcgaagcgctccataacaaataaatcaccactgtcggacagccagaaacgcggcgtttccaacccggcaaggcgagcggcttccaaacagaggaattcgttttgcgccaagtgggcatattcatctgcgccggattttacaatcaggtcagagctgagcatggttttgcggttgcccgtcaacttgtccagatcaggtaccaatactttcggctgcacccccgaaattccggactcgaagtaggtgtcgaccagaaaatcgaatacgccttgggaggtatcggcagacagaatctcctgtaacccgacctgagcctttacaggcatggacgcctctatcgggttttcataactcagccgaccaatctggttgcctccaatgaccgacagcaagcgcatttcgtccacctgcatatgcttggccatccgtcgcttgatttgatcagccaggaagccttctggcacattcatatcaaaaatcggatgcagaacattactgaccgccggtgtcgggtcataaggcattaccaacgatacttcacgaggcgactcagccgacgcgtaggcgaaggaaaattgcgatcctttggacagttcgccgctaatgccttggggagcagcgacgttgagccgtttgatcttactcatcgtgctctaccagttcggcaagcgatttgagatcaatacgccgatcaaccacttccagcgccatgcctagcgcagtaatcaccctgaaggcggtgtacatcgcgacattttcccctgcctcaaggtcgatgatggtcttgcgactgcaccgcgctttttccgcgagttgctgctggctgtattgcttcgcccggcgtagttgcctgagccgctcgccaaaagctggaggggtcgtgatgagcaaaatgtcacctatatcgaacttttaactaaattaatctgattatgtcccttatgacggacatttcaatcaccttacgtctggagaaatcggcacccacaaaaaagcccgcagcgatgcgggcttctttagttaaacgcttgaggctcagttcaccttagcgttcaactcacctttcaaataccgctggtacatcgcttccaacgagatcggcttgatcttcgaggcattaccggccgtaccaaacgcttcataccgtgcgatacacacatcacgcatcgccgtcacggtagcaccgaagaatttacgcgggtcgaactcgctcgggttggtggccatcaggcgacgcattgcaccggtggacgccaggcgcaaatcggtgtcgatgttgaccttgcgcacgccgtacttgatgccttcgacgatttcttcaaccggtacgccgtaggtttctttgatgtcaccgccgtactggttgatgatcgccagccactcttgcggtaccgaggaagaaccgtgcatcaccaggtgggtgttggggatgcgcttgtggatttccttgatgcggtcgatggccagcacgtcgccggtaggtggcttggtgaacttgtaggcgccatggctggtgccgatggcgatggccagggcgtcgacctgggtcttcttgacgaagtcggcggcttcttccgggtcggtcagcatctggctgtgatccagcacgccttcggcgccgatgccgtcttcttcgccggccatgccggtttcaagcgaacccaggcagcccagttcgccttcaaccgatacgccgcaggcgtgggccatagccacggtttgttgggtcacgcgtacgttgtactcgtagtcggttggggtcttgccgtcttcgccgagggagccgtccatcattaccgagctgaagcccagttggatcgagcgctggcacacgtcagggctggtgccgtggtcctggtgcatgcacaccgggatgtgcgggaattcttcgatcgcggcgaggatcaggtgacgcaggaacggggcgccggcgtatttgcgcgcgccggccgaagcctggacgatcactggggagtcggtcttgtcagcggcttccatgatggcgcgcatctgctcaaggttgttgacgttaaaggctgggacgccgtagccgaactcggctgcgtggtccagcatttgacgcatgctgataagtgccattgtgttgtctctcccggtcgagggtcgttaatcgtgcaagcctgccgtagcggcggctgctattcaagttattgcagatcaaggggttgagccttgtgctgctgaatcgttattgctgatgtggcctagcgctaatgccactgtgaagcaggtcaatgtgggagctggcttgcctgcgatggcggcgagccagtcgatattggctttgctgacccaccgcaatcgcaggcaagccagctcccacattttgatctcattggacttcagatcgtattctcagttggctttgcagccgcgcccaatcaaatcatccgtcgctacccagtacaccaggccttcctcacctttggtgtgaaacgccaactggccgtcgctgtacaacacgccggaggcggctacctcttgcttgagccggtaaacctggtccgaaccgccgaggcgtacatccacttcggaacgggccgggttggcaaaacgccagttgacctcggccttgctgtcgcaggtccaggtggtccatttatcggctggctctgccttgtcgaacaggttcatgctgctgcagccggccaatagggccagggctgccagggcgaaaacgcctttcattgccaatcctcgcagggcggcctatgggccgccgttgctgtcggttagtggatcagacccgtcatgggcaaccctgttcctgaccgttgggcgcggagtcatatttctccagccgttcgttgccgatgcgcttgttgatcaccggcatggtctcggcttgccagtcagcctggtaacagctttttctcaacggcgccttggcgttatccgcctcgggcgccgcgctgggtgtgctgccgcagccggccaacaggcccgctgcaatcaccagtgccaacgacttgatcatgggaacgctccttttcctgatcacgcgagccttaacctttggctcgggtttccagcacttccacggctggcaacaccttgccctcgacgaactcgaggaaagcgccaccaccggtagaaatgtaggagatctgatcagccacaccatatttatcgatagccgccaaagtatcgccgccacccgcgatggagaacgccgagctttcagcgatcgctttagccagcaccttggtgccgttgccgaattggtcgaactcgaacacgcccaccgggccattccacaggatagtctgggatgccttgagcagctcggcgaagttggccgcggtttgcgggccgatgtccaggatcatgtcgtcgtcggccacgtcagcgatgagcttgacggtagcggcggcgctttcagcgaattccttggcaaccaccacgtctaccggcagcggcacgctgaccttggcggcgatggcgcgggcggtgtcgagcaggtctggctcgtacagggatttgcccaccgggtggccggcagcggccaggaaggtattggcaatgccgccgccgacgatcagttggttgcagatctggctcaggctgttaagcacgtccagcttggtggacaccttggagccggcaacgatagcggccattggctgggccggagcgcccagggccttgcccagtgcatccagctcggcagccaacaacgggcccgccgcggcgaccttggcgaacttggccacgccgtgggtcgaaccttcggcgcggtgggcggtgccgaacgcgtccatcacaaacacgtcgcacagggcggcgtattgctgggccagttcgtcgctgttctttttctcgcccttgttgaagcgcacgttttcgaacagcacgatatcgcccgctttcacgtccacgccgcccaggtagtctgcgaccaatggcacgtcacgacccagggccttgctcaggtactcagcgacaggcttgaggctgttttcagcagagaactcaccttcggtcgggcgacccaggtgggagcagaccatcacggccgcgcctttttccagggccagcttgatggtcggcagcgaggccaggattcgcgcatcgctggtgacaacaccgtccttgacggggacgttgaggtcttcgcggatcagtacgcgcttaccttgcagatcgaggtcggtcatcttcaacacggtcatgggtcgcagttcctgaattactgttgaggttgtttagaagcgatgtgcagatagtgttcggcaacatccagcatgcggttggcaaagccccattcgttgtcgaaccaggccaggatgttcacaagcctggggccggaaacgcgggtctggctggcatcgacaatcgccgaatgcgggtcatggttaaaatcgcaactggcgtggggcaactcggtgtaggccaacagacctttgagcgggccgctggtggcggcgtcgcgcaggatccggttgacctcggccgcgtcagtgtcgctcacggtttgcatggtgatatccaggcaagacacgttcaccgtcggcacccgtacggctttggcctggattcgcccggcaagttccggcagcagtcgctcgatgccgcgcgccaggccggtggacaccggaatcactgactggaacgccgaacgcgtgcggcgcaggtcttcgtggtgataggcgtcgatgaccggctggtcgttcatcgccgagtgaatcgtggtgatcgacacgtaatccaggccgatcgcctggtccagcaggcgcaacaacggcacgctgcagttggtggtacacgacgcgttggacaccagcagctcatcgccggtcaggcaatcttggttgatgccgtagacgatggtggcgtcgacatccgcctcgctggccatcggctgggaaaacagcacacgcggtgcgccggcgtcgaggaaacgctggccatcggcacgggtgtgatagacaccggagcattccagcaccaggtcgacgcccagtgctttccagtcgatgccttcgggggtggcactgcgcaacacttgcacgcagttgccattgatatgcagacaatcgccttcaacccgcacttcgcccgggaagcggccgtgggtggagtcaaagcgtgtcaggtattcgatgctggccatgtcggccaaatcattgatcgcgacaatttcaaacccggccgccgcccctcgctcgaacagagcacgcaagacgcaacgaccaatgcggccgtagccgttgagtgcaactttgtagggacgcggttggggcatggggttctcgatcaaggttagttcagtgatgaatgtactggcgccctcgcgggcaagcccgctcccacagtggaccgtgatccaaatgtgggagcgggcttgcccgcgatggcgccagtacaaacaacgcagactgacttagtcttccagcaactcttcagcctgacccaggatgttttccagggtgaaaccgaactcttcgaacaaggctggcgccggcgccgactcaccgtaggtggtcatgccgatcacgcggccttccaggcccacatacttgtaccagtagtcggcgtgagccgcttcgatggcaatacgcgcactgacctgcaacggcaataccgattgcttgtagccggcgtcctgggcttcgaacacgctggtgcagggcatggacacaacgcgcacgttgcggccttgcgcggtcagcttgtcgtacgcctgaacggtcaggcccacttcggagccggtggagatcaggatcagctccggctcgccgatgcagtccttgagcacataaccgccacggctgatgtcggcgatctgcgcgtcggtacgcacctggtgttgcaggttctgacgcgagaagatcagcgccgaagggccgtccttgcgctcaatggcgtgcttccaggccacggcggattccaccgcgtcggctgggcgccagcaatcgaggttcggcgtggtgcgcaggctggtcagttgctcgaccggctggtgcgtcgggccgtcttcgcccaggccgatggagtcgtgggtgtagacgtggatcacgcgcttcttcatgagcgcggccatacgtacagcgttacgtgcgtactccatgaacatcaggaaggtcgcgccgtaaggcaccaaaccgccgtgcagggacacgccgttcatgatggcgctcatgccgaactcgcgcacgccgtagtacatgtagttaccgctggcgtcttcggccgagacacctttgcaacctttccacagggtcaggttggaaccggccaggtcagccgaaccgccgaggaactcaggcagcaacgggccaaaggcgttcagggtgttctggctggctttacggctggcgatggtctcgcccttggccgcgacttcagcgatgtaggccgaggctttttccgagaagtcggcaggcaggtcaccggccaggcggcgcaccagttcgttggccaattccgggaattcggcggagtaggccgagaaacgctggtcccactcggcttcggctgccaggcctttttccttggcatcccattcggcgtagatgtcggccgggatttcaaacgggccgtggttccacttcagcgcttcgcgggtcagggcgatttccgcgtcacccagtggggcgccgtggcagtcttctttaccttgcttgttcggcgagccgaaaccgatggttgtcttgcagcagatcagggttggctgcgcgctcttgcgagcggtgtcgatggcggtcttgatctcttccggatcgtggccgtcgacgttgcggatcacctgccagttgtaagcttcgaaacgctttggcgtgtcgtcggtgaaccagccttcgacttcgccgtcgatggagatgccgttgtcatcgtagaaggcaatcagcttgcccaggcccagggtgccggccagggaagcgacttcatgggaaatgccttccatcatgcagccatcacccaggaatacgtaggtgtggtggtcaacgatgtcgtggccagggcggttgaactgcgcgcccaagactttttccgccagggcgaaaccaaccgcattggccaggccttggcccaggggaccggtggtggtctcaacgcctggggtgtagccgaattccgggtggcccggggtgcggctgtgcagctgacggaagctcttgaggtcgtcgatggtgacgtcgtagccagtcaggtgcagcagcgaataaatcagcatcgagccatgaccgttggacagcacgaagcggtcacggtcggcgaacgaagggttgctcgggttgtgtttcaggtagtcacgccaaagtacctcggcgatatccgccatgcccatcggggcaccgggatggccgctgttggctttttgcacggcatccatgctgagggcacgaatggcgttggcacgctcacgacggctgggcatcgctgatctcctggagtttgcttataaagaaacggaaaaaaggaccggcattttccctcagccaccgcctgcgggcaatgacagatagtcacttgtgagcgtttttcctgtgctttgggcaccaatcccttgcagaaacctttaaccggttcgtctaaaggttatagcgatggcttataaccgccacttatcgatcaatatcaaaactttttgatattggccttgcggggatctacacccgtcactagactgctggccttatgaacctacccgtgccctccctgcgtcctgacgacggcgatgaactggctgccttgtgcaaggccgctggcgatccgttgcgcttgaacgtattgcgcgcactggccaacgattctttcggggtactggagctggcgcagatcttcgccatcggccagtccggcatgagccaccatttgaaggtgctggcccaggccgacctggtggccacccgtcgcgaaggcaatgcgattttctaccgacgtgccctgccccataccgaactgcttggcggcaagttgcacgccgccctgctcgacgaagtggacaacttgtgcctgcccggtgatgtgcagtcgcgcatcggccaggtgcacgggcaacgcgccgccgccagccaggattttttctcacgggtggccgacaagtttcgcgcccaacaggacctgatcgccggcttggcccagtaccgcgaaagcgtactggcgctgttggacaagctgagcttcagtgaagaagccacggccttggaagtcggccctggcgacggcggtttcctgcccgaactggcgcgccgcttcgagcaggtcaccgcgctggataacagcccggcgatgcttgaactggcgcgccaactctgtgagcgcgaagccctgggcaatgtgcgcctgcagttggccgacgccctgagtgacaccggcctgcgggccgattgcgtggtgctgaacatggtcttgcaccatttcgccgcaccggcagaagccctcaagcaaatggccgggttgctgcaccccggcggtagcctgctggttacggatttatgcagccacaaccagaattgggccaaggaggcctgcggtgatctctggctgggttttgaacaggacgatctggcccgttgggccaccgctgcgggactcgttcccggggaaagcctctatgtaggtttacgtaatggtttccagattcaggtccgccattttcagcgaccggctggcgacactcaccatcggtaaatatcaggaaaacatcgagatgagcgaatactcccttttcacctccgagtccgtgtctgaagggcatccggacaaaatcgccgaccagatttctgacgcggtgctggacgctatcatcgctgaagacaagttcgcccgtgtggcgtgcgagacgctggtgaaaacgggcgtggcgatcatcgccggcgaagtcaccaccactgcctgggttgacctggagcagatcgtgcgtgacgtgatcaccgacattggctacaacagctccgacgttggctttgacggcgcgacctgtggcgtgatgaacatcatcggcaagcaatccccggacatcaaccagggtgttgaccgcgccaagccagaagaccagggcgcgggcgatcagggcctgatgttcggctacgccagcaacgaaaccgacgtgctgatgcccgcgccgatcaccttctcgcaccagcttgtgcaacggcaagccgaggcgcgcaaatccggcgtgctgccttggctgcgcccggacgccaagtcccaggtgacctgccgctacgaaggcggcaaagtggtgggcatcgacgccgtggtactgtcgacccagcacaacccggacgtgtcctacgccgacctgcgtgaaggcgtaatggagctgatcgtcaagcacgtgctgcctgccgaactgctgaccaaggacacccagttccacatcaacccgaccggccagttcatcatcggtggcccggtgggcgactgcggcctgactggccgcaagatcatcgtcgacagctacggcggcatggctcgtcacggcggcggtgcgttctccggtaaggacccttcaaaggtggaccgctctgccgcttacgccggtcgttatgtagccaagaacatcgtcgctgccggcctggccgagcgctgcgaaattcaggtttcctacgccattggcgtggcccagcctacgtcgatctcgctgaacaccttcggcaccggcaagatcagcgatgacaagatcgtcaagctggtacgtgagatcttcgacctgcgcccttacgcgatcaccaccatgctcgacctgctgcacccgatgtatcaggaaaccgcagcctacggccacttcggccgtacccctgcgcagaagactgtgggcgatgacaccttcagcaccttcacctgggaaaaaaccgaccgcgccaacgacctgcgtaccgccgccggcctgtaatcgttcgcggtaaataaagccccgccaggcctgcctggcggggctttttgttgtctgcacggccacttcgggcttttttggatccaaggcttgcaggccaaatgatggcccactagaatccgcgccctctcgggcccttcaccttacttggatattgcactgcgcccgcccgggatggataagcgcgcaggcaatcgaacattgaggttttcatgcgcatttgcacactcgcccctgccgcccttctgctcagcctgttcaccctgccagcccaggccgctgacctgaacgcgctgagcggcgccctgagtgcccagctcggtggcggcaatgccggcgactgccagcagcaacccaaagacctgcaagccaagatcgacgcggccaatgccaagaacgatctgttgaaagtgcgggcctacgaggctgcgctggagcaggtcaacaaagcttgcaacaaactcgccgacagccaggcaaaagtcgacgccaagcagcaaaagcagcaggccaaggctgaaaacaacgacgctgtgaaggccttgggcggcctgttcaagtaaacagaaatacccggtaaaaagccccgctcggtcggggcttttttgtgggcgcgtggatcacttaggctgggcacccttttcgagcaaggatgctcatgatgcgcgtattactggctgttctcctaagcaccctgccggcctgggcctgggccgaagcctgccccgatgacgttcactcacagttggaaaccttgtccaggcaaatccagcagtgggacgacagctaccatcgacagggccaatcgctgatcagcgacgagctctacgaccaggcccgcacacgcctggcgcattggcaggaatgcgcccgccagcagacacccaaggctgataacccactggccagggcgcgcggcaccttacgtcacccggtcgcgcacacgggtttgcagaagctgccgagcgagccggccgtcagtgactggctcagcactcgacaggatgtctgggtccaacccaaggtcgatggcgtcgcggtgacattggtgtatcgccagggccgcttgcaccagctcatatctcgaggcgacggcctgctgggtcacgactggtcagcctccgccgccaagatccccggcattgtccaacagttgcccgacgccgttgatgtggtgctgcaaggcgaactctattggcgcctcaaccaccatgtgcaatcgctcaagggcgggctcaatgcgcgcagcaaagtggccggcctgatgaaccgtcgccagttgaacgatgccgaagctgccgggatcggcctgttcgtctgggcgtggcccgacggcccggcggacttcaccgaacgcctggccaccctggcgcgctgggggttcaccgacagtcaacagtacagccagcccgtcggcaccatcagcgaagctgcgcattggcgtacccattggtacaacgcgccattgcccttcgccagcgatggcgtggtgctgcaccaggctgcgcgggcacccgccgagcgctggcaagccagtgcgccttactgggcggttgcctggaagtacccggccatcaaggcactggcgctggtgcgcaacgttcagttcagggtggggcgcactgggcgcattactccaatcctcgaactggagcccgtacggctggatgatcggcagatcacccgggttagcgccagctcgctcaagcgctggcaagccctggatatccgcccaggcgatcatgtgtcgatcagcctggcgggccaggtgataccgcgactggacgaggtgatcctgcgcaacaagacacgcgtggacatgcaggtacccgaccctcaagacttccacgccttgagctgctggcaactggaccccggctgcgaagatcaactgctcgcccgcctcacctggttgagcggcaaacacggcctggccttgccccatatgggccgtgaaacctggaacgtattgatccaggcgggtctaatcgcaggctttctcgattggttaaccctggatgcggccgagcttgctaccattgaggggttaggcgagcgtacccgtgcgcgggtgctcgacagtattcaaagcgcccggcaacgcccttttttacaatggctctgcgccttgggcataccgccagcggcgcgcaacaacctggaaggcaactggcagacgctggtcgccaaagacacccaagcctggctggcctcagatggcatcggcccgggacgcgcagcgcaactcagcgctttttttcgtgacccgcaggtacaagccatggctgaaacattacgcgcagccggggtagatgggttttgaacaccacccggccacctgattgcgaacttggagctttatatgaaatttctcgccccctttgccttgctgaccgtcgcaggcttcatgagcacgccactgttggccgccgaagacgcgcaaccgctcacaggctgcgccgccaaacgccaggccatcagcatccagatcgaacaggccaaggcccacggcaacatcaaccaacaggccggcctggaaaaagccctggccgaagtcaccgcccactgcaccgatgccagcttgaagaaagaacgtgaaaacaaggtgctcgacgccaagcatgaagtcagccgccgtcaggccgacctcgacaaggccatgaaaaagggtgatccggacaagatcaacaagcgtaaggagaagctggccgaatcgcgcaaagagctgcaagacgcggtggaagaactcgaccagtaaaaccgatcaatgatcacggaactgtttatggcaggcgctgcaggcatcttcaactttttgcaccgcaggttgaaggttgctggctttataaggctgcacctggctggcgatcaccaattcaccggtggccgcctcaaggtcgcgagccagttgctggaactgcgcctgtttttgccacacatcatctttggcactggtgtggtcttcttcgcgcacgctcgggaaatgtttccacggctcgtgggacaacgcatccagtttgaccgcaccctcggcgaacttggcgccatcgaatgggatacgcccgcggagcatgccgcccaagtcttcaccggtcttgagcatctgcttgaagatcgccttgcgctggcccaagggagaattggggtcaacaccgccacaggcagacaccgccaggcaggccagcaatacaacagtcaatttttttaacatcatcatggcttcaaggtcacgggaaacggcggccagtatcctcgcaccgcctacaaagaccaatagccctattaataataagggttgcccggatgcagtgaagcacgggcaatcgtttcaggaactacctacatgaatgtcaccttcaaaccctggggccggcgcctggcgtgggctctgccgatgttcgcgctactggccggctgcgatggcggtaaagaccccggcaaacaagttgcccaggagccaaccaaacctcacgccgttgccacctatgtgagcgcaccgtgggaagccctgccgagcgtttccgacagtgacttgctcgccgggtttgaatcctggcgcagcgcctgccagcgcctcaaggccgacccgatctggggcgcgacctgcgcggccgcggccagcgtaccgggcgatgccgtggcggttcgcggctttctaaaggaacacctggatgtcttcggcctgcgctcggccaacaacacgccaaacggcttgatcacgggttattacgagccggtctaccccggcagcctgaccaagaccgccaccgcccacgtgccggtatacggcgtgccggatgatctgatcatcgtcaacctcgagagcatctacccggaactcaagggcaagcgcctgcgcggtcgcctggaaggccgcgtgctcaaaccgtatgacgatgccagcactctcaacagccaaggttccaccgccaagccgatcgcctggctgaccgacccgatggacctgcaattcctgcagatccagggctcggggcgtattcaactggccggcgggcgccaactgcgtgtgggttacggcgaccagaacggctacccgtaccgccctatcggccgctggctggtggaacaaggcgagctgaaaaaagaagacgtgaccatgggcgccatcagcgcctgggccaaggcccacccgcagcgcattccagaactgctggcgagcaaccccagctacgtattcttcagcgcccgccccgacagcaacgaaggcccgcgtggttcgctgaacgtgccattgaccgccggctacagtgtggcggtggatcgcaaggtgattccgctgggcagcctgttgtggttgtcgaccaccaaaccagacggcacgccactggcacgcccggtcgcagcccaggataccggcggcgcaatcaccggcgaagtgcgcgcagatttgttctggggcacaggcaatgccgcaggcgagttggcggggaatatgaaacagcaagggcagatctggatgctgtggcccaaaggtgcggcattgccccaggtgccggatgcgcctgccggcacctgacgaccgttggtttttttgtaggagcgagcttgctcgcgaaaaactcacaggcgccgcgcttactcagcaagcacgcgttatcgttgacgttcttcgcgagcaagctcgctcctgcagtcgggtttgccgccccctcttacatcgagacgaagaagaaactcgcaatcaacgccatacccacggcccataccagcgaacgcaagatcgcccagtccgccaggtagcagatgatgtacagcaggcggctggtgataaacagcactgccagcacgttgatcgtcaccaggtcggcgttgccggccaggtgcgcaacgatcactgcggcggcaaacgcaggggtcacttcgaaactgttgagttgcgcgctatgcgcacgcttggcgacgccttccaggctatcgaggaaggcacgcgggtcgtggttatcccgtggcccgaacttgcctgtactgaacttggccacaccggtgcaaatgtacggcagaaaaattgcgatcaacacacaccataaagcgactgtcatcaccgattccttttagttttatccgacggttagagtttcatcaccaacatgccaatcaacaccaacccacaggctatgagccgtggacggccaaaaggttctttcaagtaacgcatgccgaacagcaccaccaggatcacactgacttcccgcagcgcagcagcttcggcaatcgagcccaactgcatggcccaaagtaccaaagcgtagctcaacaatacgcacagccccacgctcaagcccaaccgccactgggtgcgccagaacaggttgaaggctgcccgcttgcgcaccagggccagcaacggaaacggccacgcgctgaccagcgtcagccacaccaggtaatccagcgggtgcgcccagcgccgcagcgcctgcccatccagaaaggtgtagcagccgatgcacaggccgatcatcaacaccaccggcagcatcgaccagggcaaccggtcaccgccgccgccctgccacaacaggcacaccatgccgaacgggatcagcaggatccccagaatctgctgggtgctcagcacttcgccagcaaacaccagggtcagcaccagcaccaccagcggcgacaaaccgcgcatcaacggatacaccaggcccaggtcccccacccgataggcctggatcaataaatagcgatagagcaattcaaacagcgccgaggccgcgatccacggccagatgtccaacggcggcaaggacacgaaccccaccgccactaccacgaacagcagcgccacgctgtccatgcaggcgataaccaaaaggcgctcgccactgaacttgatcaaggtgttccacgtcgcatgcaacagcgccgctaccagcaccagggctgtcgctaccacccgaacctccttaattgatacgtcatgtaacagcacctgtttatactaaaccccgactcaacgcacctcgtgcgcctatattcccccccttccaaggaccccggatgcttgaacttgtcgccgccttcatctgcctcaccaccctgctcacttatgtgaacttccgctttatcggcctgccgcccaccatcggcgtgatggtcaccgcactgctgttctcgctgatcctgcaaggcctgagcgtgctcggctacccgggcctggaagaacgtatccagcagttgatcggccagatcgacttcggcgatttgctgatgaactggatgctgtcgttcctgctgttcgccggcgccttgcacgtcaacttgaacgacttgcgcagctaccgctggcccatcggcctgctggcaacctttggcgtgttgatcgccaccgtggtgatcggcagcctggcgtactacatcttcgccctgtttggctggcacgtgagcttcctttactgcctgctgttcggcgcgctgatttcccccaccgaccccattgcggtgctcggcgtgctacggaccgccaatgcttccaaaccgctgaaaaccaccatcgtcggcgagtcgctgttcaatgacggcaccgccgtggtggtgtttaccgtgctgctgggcatcgcgcagttgggtgaaacgcccaccgtgggcgccacggccatgctgtttgcccacgaagccattggcggtgtgctgtttggcgggctgatcggctatctcgtgtacctgatgatcaagagcatcgaacagcaccagatcgaagtcatgctgaccctcgccctggtgatcggcggctcggccatggcttcggaactgcatgtatccgcgccgattgcgatggtggtcgcggggctgatcatcggcaatctggggcgcaagctggcgatgaacgacatgacgcgtcgctacctggatggtttctgggaactgctcgatgacatgctcaacgccttgctgtttgcactgatcggcatggagctgctgctattgccattcaattggctgcacgtgttcgcggccagcctgctggcggtagcgatcctgctctcgcgcctgctgaccgtggccccggcgatcctgttgctgcgccgttggcgcacggtgccgcgcggcactatccgcatccttacttggggcggcctgcgcggcggcgtctcggtggcactggccttggccctgcccctggggccggagcgtgacttgttgctgagcatcacctatatcgtggtgctgtcctcgatcctgttgcaggggttgagcatcggcaagctggtcaagcacgtgacccggggcgaaccccaggccacgcctgagcatcactgacccttgttgatctgctgcggatgcctcgggtccgcagcctttttacctggcaggctgctttcgctgcgaacctgcgcatggctgatcagcgcaaagatgaaactaccaccgatgatgttgccggccagggtcggcccggcgaagaccagccagaaatccttccacggcaactcgccggcaaacaccaggtaggacacttccgctgaaccgacgacgatatgggtgaagtcgcccagcgccatgaagtaagtgatcaggatgataatccacagcttggcgctctccatcgacgggatcatccagaccatggtggcgatcatccaaccggagacgatgcccttggcgaacatctgcgcggggtcgttctccatgaccttgcgcccgatctcgaggaaggccaggtcggtcttggtatcgaagatcggtaggtgcagcatcacgtaggccaccagcaaagtaccgcacaggttgcccaccagcaccaccgtccacagccgtaacaagcgcgcggcattggccagggtcggcttgctcatcaccggcagcacggcagtcagggtgttttcggtaaacaattgctgacgggcaagaatcaccgcgagaaagcctgcgcaatagccaaagctggcgatcaccttgaattcctcaccgtccggcagccgcgaattgagcaggcccatgcccatcagcgacaggcccatggtcaggccggcagccagcgccgaccaccacagcgcggccacattgcgctccagctcctgatcgccttgggtacggataatttcgtgtaatacagccgcgcgaggcggctggttgtcatcaacgtcctgctgctcttcctgcgacaggttgggggtcttgccgtctgcttgagtggccatgatgtaccagagtccaaggggtgcctgtagctacgacacgccgcgacgatggctgttcagtggcaccgcaactaaaccggaatacgccaggccttggcctgctccacagtggtagagctcaaggatgtactccagggtttattacgcgcccggtagtgtttgacgatgccatcaagcacacggttaaactccgctggcgtcgtcgcctcgcccaaatcacgcaccgcgcgttgcaataactctacgttggcagccggctggccagggcggtatagcgagggataaatgacttcgcggataaaattctctgcctttaccccaatatcgcgtctttgcatttcgccaacggcgctcgttaacaccttggacatgcctgagccattgcccgacgccagtttggcgcccacctgcagcagttgctgaaaattgcgctggcctggcgcattcaggcgcttgcccagccattcgatatcctcgggcctacgagcgagggcgtctagattgcgcagtgccgaggctatttttggcgtaatcaccagcgacgtgctggattgattcgcctcggcaatcgcagtgtccaacgcctgtaacgcctgctgtgcgtccttgcgaaaacgcaacgcctcggcgccggccgggtccttttgcagatcaacctgcacgctggcgagcatttgatcatccatagccatcacggcgtcgttcatcgaggggaattcatgacgctcacgctccagctcacgtttttgcagatgccctgacaccgcctggcgggcctgggactgcaaatgctgtttctgctcaggggtcatggtgaagttgacggtgccattgagcaggccgcgaaagtcgcctttgcccgagttcagtggcagcgttaccgtttgctccgaatacgttttgagccggtcatcctgatagctttcagccgcggtgtgtggcgtgccggtgatcgtgtcgaccagggagctgaaaaaacctccgctttttgggggggctgatggtttgtcagactcgaacttgacgatcagggcttcgtccttgcccagggggctttccgggaaagaacgctcaataatgcctggcgccggggtattgaggagcaaaccaccgtcctgaaacgccgtgacctctgaagcagcctgaaacccgtggccctgttcggaagggctcttgaacaacccaggcagcgcccccgaaataagcgcggcgcgggcgatatccatatccggtgtgaggctggcattgaatgtcaccaactgcgggcgaccatcgaacatgcccgtgccggtgatgttcagttgcttgatcgccggaatatgccggctcaaaatttccaagtcgcgaaacgtcggccctccgccagcgcttagccggtcggcaatttccgtgacctcgggcggtcggtttgccgctggcatgcccgcgatatgagcgagaacagacttacgtgactcgttacgaatcaagtcctccaaaggctgcccctcggtttgcagacgcggcaacagcgtcagcaacagttgagagatgttaccggccggcccaggcaaactgccggcgagcttgccgagcttggaactggcgtcctgcaaccaagacatgaccgggtctttgctgttgagcaagctgggcaggtcaaggttattcgacagttgcgtaaaggccttggcatccatgccgctggcgagcagcgctgcggaaatcgcgccggcagaagagccggaaaccactttgacgcctttgagtttgtcggcctcttcaagcgcctgcaccatgcctggaaaggcgatgcccttggcgccaccgccactgagcaccaagtgagcaggcggcggcggtgacagcaccacctccacacgtccatcgctgtgacgataaatactcaggttgcgctcgcccacacctttgaccagaggcgtctttacatcctggtcggtggttcgaggcagagggggctggttttctacaacagaactggagactttcatacgcgaggctctctctacagggtgtaggcctgagtgatgagagagcctcggatagatccatgtgaaatgatttggtaacgcaaatcacgccgtgcagttgttactcgggaagactgtcgtccttgaactggtccttcacatacttgatttcggtacggccatggggcgccggcaaaccgtcttcgcccaggttgacgaagaccattttttccacggtcaggatgcttttgcgcgtgatcttgttgcgcacttcacaggtcagggtgatggaggtgcggccgaactcggtggcggtgatgcccagttcgatgatgtcgccctggcgcgaggcgctgacaaagttgatttccgagatgtacttggtgaccacgcgctggttgccgagttggacaatggcgtagatggccgcttcttcgtcgatccagcgcagcaggctgccgccgaacagggtgccgttggggttgaggtcttcgggttttacccatttgcgggtgtggaagttcatgatcactccaaagcgtcttgccaaatgatgggcaacatcatggcagagccagggcccaagctctatgagccattagctatcaggcccatgagcgatcttcatgccgccggatagaaaggcttgggaagtgccgctgacacggctataatcgcctccgcttcaaaacggtcatcttcgattgataccgttctcccgccacctgtccgaggggcgctgcagcaggttcaacctgtcaggctcggatggggcgttgtccggcctggttgccctggcctgatactaaacgcacaacggcgcccattcgcaccctacgaatggaggctctctatgagcgctgtaatgacgcctgctgatttcaatgactacaaagtcgccgatatgtccctggctgcctggggccgtcgcgaaacctttatcgccgaatccgaaatgccagccctgatgggcctgcgtcgcaagtacgccgctgagcagccgctcaagggcgcgaagatcctcggctgcatccacatgaccatccagactgccgtgctgatcgaaaccctggttgccctgggtgccgaagtgcgttggtcgtcgtgcaacatcttctcgactcaagaccaggccgctgccgctatcgcagccgccggtatcccggtatttgcctggaaaggcgagaccgaagaagagtacgagtggtgcctggagcaaaccatcctcaaagatggcgcgccttgggatgccaacatgatcctggacgacggcggcgacctcaccgagctgctgcacaagaagtacccgcagatcctcgatcgcgtccacggcgtgaccgaagagaccaccaccggcgtacaccgcctgctggacatgctggccaagggcgagctgaaaatcccggccatcaacgtcaacgactcggtgaccaagagcaagaacgacaacaagtacggctgccgtcacagcctgaacgatgcgatcaagcgcggcaccgaccacctgctgtcgggcaagcaagccctggtgatcggctacggtgacgtgggcaagggttcgtcccagtccctgcgtcaggaaggcatgatcgtcaaggtctccgaagttgacccgatctgcgccatgcaagcctgcatggacggtttcgaagtggtttcgccgttcatcaacggccagaacgacggcacctccgcctgcatcgacgcagccctgctgggcaagatcgacctgatcgtcaccaccaccggtaacgtgaatgtgtgcgatgcgaacatgctcaaggccctgaagaagcgcgccgttgtctgcaacatcggtcacttcgacaatgaaatcgacacagctttcatgcgcaagaactgggcatgggaagaagtgaagccgcaggtacacaaggttcaccgtaccggcgctggtgatttcgacccacagaacgatgactacctgatcctgctggccgaaggccgcctggtgaatctgggcaacgccactggtcacccaagccgcatcatggatggctcgttcgccaaccaggtgctggcgcagatcttcctgttcgaacagaagtacgccgacctgtcgcccgcccagaaagccgagcgcctgaccgtggaagtactgcccaagaaactcgacgaagaagtggccctggaaatggtccgcggcttcggcggcgtggtgactcaactgaccaagacccaggccgactacatcggcgtgacggttgaaggtccgttcaagccgcacgcttaccgctactgatcggccttgctggcgccggctcttctgtgggagccgggcttgcccgcgatgcagacgcctcggtgttccaataacaccgagctgatgctatcgcaggcaagccagctcccacagaaagccaggcacccgcatcgattgcgtatgccttccaggctttcgagtttccaagggtatgaccatgtcccaagaccgtcgctacagcttcgagttcttcccgaccaagaccgatgctgggcatgaaaaactgatgactactgccaagcagttggccagcttcagccctgatttcttctcctgcacctacggcgctggcggttcgacccgtgatcgcacgatcaacaccgtgttgcagctggaaagtgaagtcaaagttcccgccgctccgcatttgtcctgcgtgggcgacagcaaagccgacctgcgtagcctgctgacccaatacaaagccgccggcatcaagcgcatcgttgccctgcgtggcgacctgccatcgggtatgggcatggccagcggtgagctgcgctacgccaacgacctggtgagtttcatccgcgaagaaagtggtgatcactttcatatcgaagtggccgcttacccggagatgcacccccaggcgcgcaatttcgaagacgatttgcagaacttcgtgcgcaaggccaatgccggcgccgacagcgcaatcacccagtatttcttcaacgccgacagctacttctacttcgtcgagcgtgtacgggcgatgggcgtgaatatcccgatcgtgccgggcatcatgccgatcaccaattacagcaagttggcgcgcttctccgacgcctgcggcgccgagatcccacgctgggtgcgcaagcagctggaagcctatggcgatgacgtcaaaagcatccaggcgttcggcgagcaggtcatcaccgagatgtgtgagcaattgttgcaaggtggtgcaccagggttgcatttctataccctgaaccaggctgaacccagccttgccatctggaacaacctcaagctgccacgttaacgcttgcccagttgtgccaaggccctcgttctgacgagggcctttgtcgttttacgttacccacggaaccccgcagtccatgaatacagtgcccccgacgtcccgcccgcaactggtctacctggtcttcggcgccgacacctaccatcaggaagcggtattcagcatcgccagcgcactggcgttcctgcaggacacgccggacgcgaacatcgacattcaggtattcagcgacaaccccgagccttatcgcttgctgccggtgcgcgtccgaccgttggacgaggccacccgcaaacgctggagcgagccccacggctatcactttcgcaccaaacacgtagtgctgcgccaggtgctgcaagaatccccggtggcactgctcatcgacactgacaccttcttccatcattcgcccatggccctgttcgaacgcgtacagcccggcaccctgctgtgcaacgccttctacaccaaatacggcgacaaccacgaaagcatcctgtacaccgccctacgccagcgcctgctggacatgggcgtggctgacgatgacatgatgaccctcaactccggcgtcatgggcctgacccaacaggatgcgcacatcctcgaccgctccatcgagttgatggatgaactgtttccccatgcccagggcgcgtacacccttgaagagttctgcctgtccatcgccgcctaccgcaccgtcaaggtgcgcgagtgcccggacctgatccaccattactggagccgcaaacagctgttccgggccaaggtcaaggcgtggatcgccaagcacgccagcgcgcccaccagcgcacaagccctggccgatacgcgccaggtctcctcgcacctaccgcgcccgccgcgttttcagcgcttgatgtacaagctgatcaccctgctgctgcccaagcaccagcaacagttcatccgcgaaatcctctacggctgctacgaacacgaaaacgagttcgaccaggcctgcggcccggtgtggtgggacaaggcccgacaaaaccaggaagaacgccagaagcgcccgcttgatgcccaccagctggaacactggttcgccaaccccgtggtgcgtttgattctgggtgagcgccgcgccgcgatccacgaacacctgctgaacgctcccgcgaagtaagaccgcccgccaatgcgcgtgccagagcttctctttctgtggacagcgtcgtaacctcagggtatgcccgtcttcttcaagctgttcaccgctgtgttgttttcttgcctgagcctggccgctcatggcgagaaactgcgcattgtcaccgaaccctgggcaccctatgtctacgaagacaacggcgtcatggccggcctggattatgaaaccacggtgatcgtgttccagcgcctgggggtggaggtgcaatggcagttcctgccctggaagcgctgcctggcgatgctcgatcagggccacgccgacggcgcgctggatattttccacagccaggagcgcgacgccttgctgctctatcccagtgagccgttgtcggaagtcgaatttgtcttgttctatgccaacgaccgcccccaccccgccgccaccctcgacgacctgcgtggcctgacggtcggtgtttcccccggctacctctatggcgacgcgttcagtgggtccaacaccttccagcgtgaacctgcgcccagccatgaagccaattttggcaaactcatgctggggcgcgtcgatatggtggtgactgaccggcgcgtggggcactacgtgatcaaggcgctgggcctggaaggtaaggtcagccaggcgtcggtggtggtcagtcgccagcagcaatttcttgcggtacgccgtggcgcaggcatggacctgctggtgcaacgctttgccgccgagctcaagcgcttcaagcaagagccggcctatgccaccttgagtgctaaatatggccggatgcaggagcaaacggcacccataccacctcccgaacacgccgttgagcagcaggaaagcagcgcgcagtgattgctctgttatactgcggcctttccgccaggcttacgcccggccgctcgggtcttgaaaacggcacccaacccagctactgcgcagctttgcggcccgcgcgagccggtggagtgcccgccagacgcagcaggaccggacggggttgcgctcccctaagcgccattcacgcccggcaagattatccctttgggccaagccctaactaaaacaggattactcatgtcctttgcttccctcggtctctccgaggctttagtccgcgccatcgaggcagcgggctataccgagcctactccggtgcaacagcgggccattcccgccgtgttgcaaggtcgcgacctgatggtcgcggctcagacaggtactggtaaaaccggcggtttcgccctcccgatcctggagcggttgtttcccaacggtcacccggacaaatcccaacgtcacggcccgcgccaaccgcgtgtactggtcctgaccccaacccgcgaactcgccgcccaagtgcacgacagcttcaagctgtatgcccgcgacttgaagtttgtcagcgcctgcatcttcggcggcgtcggcatgaacccacaggttcaggccatgtcccgtggcgtcgatgtactggtagcctgcccaggtcgtttgctcgacctgtgcggccaaggcagcgtcgatttgtcccacgtggaaatcctcgtgctcgacgaagccgaccgcatgctcgacatgggctttgtccatgacgtgaaaaaggtcctcgcccgcctgccggccaaacgtcagaacctgctgttttcggcaacgttctcccaggacatcactgccctggctggcaagctgctgcacaaccccgagcgcatcgaagtcacgccaccgaacaccacggtcgagcgtatcgagcaacgtgtgttccgcctggccgccagccacaagcgctcgctgctggcgcacctgatcacccacggtgcctgggaacaggtgctggtgttcactcgcaccaagcacggcgccaaccgcctggccgagtacctggacaagcacggtctcaccgccgtcgccatccacggcaacaagagccagaacgcgcgcaccaaagccctggccgacttcaaggccggtaccgtgcgtatcctggtcgctaccgatatcgccgcacgtggcctggatatcgaccaattgccacacgtggtcaacttcgagctgccaaacgtcgatgaagactacgtgcaccgtatcggccgtacgggccgtgccggtcgttcgggcgaggccatttcgttggtcgcgccggacgaagaaaaactgctgaaaagcatcgaacgcatgaccaagcagaaaatcgccgatggcgacctgatgggcttcgatgccagcgccgtggaggccgagaagccagaagcgcgcgagcgtccggatgtgcgcaaccctcgcaacccacgcggccccaaaggcgatggcccgaacggcggcggtggtggcggtggtcgtcgcgacaaaggcaaggacaagggcaaggaaaaatccgcgaccagcagccgtggcgaacgcccggcccgtgagcagaagccccgtgaaggtaccccggcccgcgaacagcgccagccgagccagccaccacgcgccgcggccgaccgtgccccggacgagttccttgacgacgatatcgataacttcggtaaccgcgtcgactacgtaccccaggccaaaccagcccagggccgtggccgtcgtccaggggctccggcccagggcgcaggcgctccacgtagcggccagccacagggcggtcgccagaacgccccgcgcaacagcagcggcggcaccaccggtaccccgcctgccaagcgcagcggcccgcgtaatggcgcaccgcgtgacggccaggcccgtcgcgaagactcgcgcagcaacaaccgccgcccggcccgtgacgatcagcctcgctcgtccgagcctgcggtacaaaacccgcgcggtggcccggcgccgaagatcatccacaaggagtcgaaagcagatcgcttcccgacacctgagcagttggaccaactgccaggccgtcctcgtggtgagaaaccagcgctgctgactcgcaaccgcgaggcataaaaaaaacccgtatcgcgagatacgggttttttttgcctgtaggagcgagctagctcgcgaaggtcgtcaacgataacgcgggcatcccggtttaacgcggtgcacttgcggccttcgcgagcaagctcgctcctacatacgaagcattacttcgctttcacaccttcaaaggtgatgtacagctcaacagcgtcggactgtgggcctacgtccatgccagccgggaagaactctttgcggctgatcgaggtggtgccttcaaagccggcacggtagccgccccatggatccttgccttcgccaaggaacgtggccttgaccacaacaggcttggtcacgccgtggaaggtcaggtcgccagttacatcggcagtctgcttgccatcagcgttcttgccggttggcttgacgctggtggagacgaacttggcatcagggaatttgcccgcatccaggaagtccttgctggtgacgtgcttgtcgcgctcggcgtggttggagaacacgctggcggtgcgaacattcacttccaccttggcgtcttcaggcttggcagcgtcaaagctgaacttgccgtccaggtccttgaaggtgccggtgatgtagctgtagcccaggtggctgattttgaaatcgacgaaggcgtgctggccttccttgtcgatcacatagtcagcggccatcgccgaacctgcggacagcagtgcagaaccgattgccagcgcagcgagtgtttttttcaacatgctttctattccttgtgagtcgaggttgaacatcaggctttgcgtcccagcattcgcgtaagggtcgcatcacgatcgataaaatggtgtttcagtgccgccacgccgtgcaagccggcgaagaccaccaacacccaggccaggtacaggtgcacccaacccgcggtatctgcctggtccggtagaccggaaaccacggcaggaatttcaaacaggccaaacaccgggataccgacaccgtctgcggtggaaatcaggtaaccggcaatcatcacggcaaacagcccaacataaaggaacgcgtgcccaaatgcggcaccgatccgcgtcatgcggctatagctggccagcggtggcggcggcgggctgaccaggcgccagacgatccgcaccagcatgatggcgaacagcgtgatgccaatgctcttgtgcaagtcgggcgcatctttgcgccaagcgctgtagtaatcgagaccgaccatccacaggcccaaggcaaacaaaccgaacaccaccagggctacgccccagtgcagaaccatgctgacccaaccatagcgggccggcgaattacgtagctgcatgtacttaatcccgtaagaactgtgcccaagactagcgctttacctatcgaattaaagcggaaaattttgctttgaaatatcgagaaatacgataaagaggctaggcatcataaattaacaagggattaagactatccctgggaaacgtgacagaccgtcctgcatttactgccaatttccgcacaatggcttgtgacccaagccaccattgcataggcttgcgcgattgtttcgcctgcgcccgccgcaggaccgcttcgaggagatcaccgatgggcttgaacaaccagtggatgcaacgcgacctcgcggtgctgtggcatccctgcacccagatgaaagaccaccagcaattgccgctggtgcccatcaagcgcggtgaaggcgtatggctggaagacttcgaaggcaagcgctatctcgatgccgtcagttcctggtgggtcaacgtattcggccatgccaacccgcgtatcaaccagcgcatcaaggaccaggtcgatcagctggaacacgtgatcctcgctggtttcagccatcaaccggtgatcgagttgtccgaacgcctggtcgcaatgacgcccgaagggctgacccgctgcttctacgccgacaacggttcgtcctgcatcgaagtggcgctgaagatgagctttcactactggctcaaccgcggccagccgaataaaaagcgcttcgtcaccctcaccaacagctaccacggcgaaaccatcgccgcgatgtcggtgggcgacgtgccgctgtttaccgagacctacaaggcgctgctgctcgacacgatcaaggtgccgagcccggactgctacctgcgccctgaaggcatgagctgggaagaacactcgcgcactatgttcctggccatggaacagaccctggccgagcatcacgacaccgttgccgccgtgattgtcgaaccgctgatccagggcgccggtggcatgcgcatgtaccacccggtgtacctcaagctgctgcgcgaagcctgcgaccgctatggcgtgcacttgatccacgacgagatcgctgtgggctttggccgcaccggcagtatgtttgcctgtgaacaagccggcatccgcccggacttcctgtgcttgtccaaggccctcaccggcggttacctgccgctggccgcggtggtcaccaccgaagaggtctacagcgcgttctacgatgactaccccacactgcgtgcgttcctgcactctcacagctacaccggcaacccgctggcctgtgcggcggcgttggcaacgctggatatctttgaagaagacaacgtcatcgagaacaacaaggccttggcccagcgcatggccaccgccaccacgcacttggtggaccaccctcacgtatccgaagtgcgccagaccggcatggtgctggccatcgagatggtgcaggacaaagccaccaaagccgcctacccatggcaggagcgccgtggcctgaaggtcttcgagcacgcgttggaacgtggtgcgttgttgcggccgttgggcagcgtggtgtatttcctgccgccgtatgtgattacacccgaacagatcgactttctggccgaagtggccagcgaaggcatcgatatcgccactaacagcaaggtcagtgtggcggtgccgaaagacttccacccaggcttccgagacccgggttgattgcccaaatccttgtaggagcgagcttgctcgcgaaggtattccaggcgcaccgctgcgtcggatgtacatttttcgcgagcaagaactaggcgtccccctcgctcctacgtaaacaacctcttcagagaacagaaatgagactgtcccgctttttcaccgacgccccgctgagcctcggtgaccacgaattgcccgaagcccaggcgcattacatcagccgcgtgctgcgcatgggtgaaggcgatgccgtgcaattgttcgacggctccggccaggagtttcgtggcaccttgctggaagtcggtaaaaaacgcgtcaccgtgcaactcacggaaagctttgccggccaggccgaatctcccctgcacattcacctcggccagggcctgtcccggggcgagcgcatggattgggcgatccagaaggccactgaactgggcgtcaacgcgatcacaccgatcttcagcgaccgctgcgaagtgcgcctcaaggacgaacgcgccgacaaacgcttgctgcactggcgccaggtggcaatcagcgcgtgcgagcaatgtgggcgttcgacggtgccggtgatacacccaccgctcttgctggccgactggctcaagcaaaccgaggcggatttgaagctggtgctgcacccggtggcagagccgatgatcagccacgccaagccatcgagcctggcgtttttgatcggccccgagggtgggctgacggacaacgaagtcgaaacggcccagagtgcaggcttccacgccgcccgcctcggcccgcgggtattgcgtaccgaaaccgcgcctgtcgtcgcgctggcagtcgcccagcaattgtggggcgacttctaacctcaccctgtaaacccaatcaactgtggagcaggcaagccagctcccacagtttgatcgggttagcacttgctcattccaccgggtcactcaccggcttggcgatgatcgccttcaactcgctggtcatcgggaactccaggttcaagcccttgggcggaatcggctgctcgaaccagcgctggtaaatctcgttgatttcccccgagcggtacaggtcgcccagggtttcgttgaccaccgcgaggaactgcgggtcatccttgcgcaccatgcagctgtagatctcccgcgactgtcccttgcctaccaccacccaatgatgcgggtccctggccttggcgcgctcgccgtaaagcagggcgtcatccatatagaacgctaccgcccgaccggtttcgagcatcttgaacgcttcgccatgatccctggcgctgatcacgaacatattgctctgatgctcggcgttatagcgtttgagaaaccgctcgttggtagtgccggcggtagtcactacgtgcttgcccttgaggtcagaaaagccattgatgccactgtccttggccgtcaataactgccctttcacatagataaacccataggaaaacgccacctgcttctgtcgctcggctgtcaccccagtggagccacactccaggtcgacggtgccgttctgcaccaatggaatgcgggtctgggacgtcaccaggcgatacttcacccgcaacttcggcaggccggttttttcccgaaggcgctcgatgatcctgtgcgtgaggtccaccgaatagcccattggcctgccgctctgatcgcctatatacgagaacggcactgacgcatcgcgatagccgacagaaatttgttgggtggtggtgatttttttcaaggttgcgctgaagtcgtccgccagcgccagatgccctcccagcaccagcgaaacgaaagcacatgccttgaaaacgcgacaggcaaccacttttcctggcatcaggcggtaccactggccacgggccgggctgccgttcgagccggtgtcacgcctatccagacatcattattcatcgttgtacgctccgctaattagcgatcaggccgccctgggaagaaatacatgggcgtcgatcgaggtgggccgttcggcaatcatttcagccaacaactggccactggcacacgcaagcgtgaaaccgagggcgccgtgcccgaggttgagccacagattgcgataagaactggcgccaatcagtggcaggcccgtgggcgtcgctggccgcatacctgcccattcaaccgcagcgtcgtaatttccggccatcggaaatgtctggcgggccaagcgttttacgaccgccagacgcttaggctctggtgagctgttgaagccgaccatgtcgaccatcgcggcgatacgcaactgctcgccgattcgggcataaacagtcctgcgatcgtaatccgtcacgctgatcttcggcgcacagtgatgttcgccgatgggcacactgaggctgtagcccttgagggggtaaagcggtaaacgcatccccggcaaccccaggctcgaactgttatggcctgccgccagaatgaggttctctacaggcagaacttcatcttcaagctccaccgccacgaccgtaccaaatgcctcatgaatacgttgcaccttgcgtccgtacacaatgcggcaacgtcccgacgcctccaattccccgcctagcagttggcagaaggcatggcaatcggcgacttcttcggtagggttgtaaatacctccgataaaggtgccctccatcagcgaaggctcaagcttgcggcagtcttcggccgatagcacctgttgctggagggggtctgtcagtttgcgccgcgcctctgcgaagctgtcttcggagcggaaggtcagcagttttccattgcgtttccagttgaagccctccagatggtcctctacccgccaacggttcaacacgtcctggctcatcgacgccaggcgaagcaaatgcgcggagttggtgcggttgacagaggtgcggcatgccccgatgaacgaggcgagccagcgccattgcgacgagtcaagtcgaggccgcagcttcagcggcgactcagaacgcaacagaaagcccagcgccttgagtggaacacctgcgtcggcaaggggagtgacatagcgataggacagttggccaccgttcgcgtagctggtggcactgcccaactttttttgcgcttcgaccagggtgacttccatgcctgcacgcacacatgcataggcactcgccaagccaatgacgccgccgccgatgatacatactcgccttgccatattgacacctcacatggattgaaacgaattccagagtaggttccagtgacaaaagttgaacaatgaataaaggtaagcgacccataagttgaggttatgaactttcatgcgcttgcgacatatagaaatcttccaggccatccggcagacgggctccatcagcgccgccgcgcagttgcttcatgtctcgcaacccgcggtaaccaaggtattgcaacacgccgaattgcaactgggctttcctctgtttctaagggtgcgcggcaaattgcagcccacctcggaagctctggccctggaaagtgaagtagagaaagtgacgacgagcctgcagggggtgcagcggctggccaagagcttgcgccatacgccggagcaaagtgtgcgcattggggcgatccccgcgctggcgcagtcactgctgcctccctccattctggagtggaagcgcagctacccggacatcgcctgcgagctgtccagcgaccatagccgcgagctcgtgcagcagttactgatgcgtgaaatcgacctggcgttgaccctcaatttctccggccacccgggcctcaccacccagatactggcgaacggagcgctggtggcgttggcctcaaaaggctactggcctgaatctgaatcacacaaggcactgccgttggccgacctggcaagtacgtcgctgatcggcctttccagcgccgatccgttggctgcaaagctcgacaactatctggaaaacgtcagcccaccgccacaaataagcatttgcgtacaaacctattccctggccagggcgatggtcgaatcgggcgcgggcataacggtcatcgaccccttcaccgccctcagtgcctccacggcgaccgtgtgtatccgtacgctcacgccacccctgccgattaccctgtacgccttgacccgcgcccacgaaccgccgccgcatatgttggccgacctgctgcagattttcggcacccgggcgcgggagttgctggacctcccgcaggtcagagcacgtaatgcatgatcgccacgaaatgcagcaggctgccgccgatcacaaacaaatgccagatgccatgggaatggcgcaagcgatcctccagagcaaaaaagataatgcctacggtgtacagcactccgcctgacgccaaccagataaaaccggccgtgcccagcgccgccatcagtggtttgaccgccaccagtacgatccagcccatcacggcgtagatcacgatggacagaatccgcgcctccgagcgcggcttgatctcctgcaggatgccgatcaccgccagcccccagacaatcccgaacagcgtccagccccacggcccgcgcagggtcaccaggcagaatggcgtgtagctgccggcgatcaacaggtaaatggaaaagtgatcgaccttctgcatgatcgcttttcgccggccccgcacgctgtggtacaccgttgacgcgctgtacagcaccatcagggtaaaaccataaatcgccacgctgacgatcttccaggggctgccgtccaggctcgccaccaccaacatccacacggcgccaatacaggccgcgactgcaccgagcaaatggctccaggcgttgaatcgttccccgtggtacatctgtcactgacctcccgtaaccctcaagaacaggcggacaagcgtcctgccttgcgcatcagagtgcaagcggcacgtgacgttccggcgacgacagccgcgtttacgggcacaatcgagtgcaatcgaacaagagcccaaggccatgctgatcgacgaagaattcaccctcaagaagctggagatcttcctggcgttcatgcgcaccggcaacctggcccgcgcggccgccgagctgcaaaccagcaatgtcagcgtgcaccgcgccattcactccctggaaagtgccctgcgctgcccgctgttcaaacacgaggggcgcaacctcaccccgctggaaagcgcctacgtactcgaagaacgcgcgcagaaactggtggccgacgtggtcgacagcgtgcgcctgacccgcgaagccgccgggttctcggccgaacgcttcaagctcggctcgctgtattcgctgacggtcaaaaccgtgccgcaactgatcatgggcctgaaaatccggcgcagcgaactgaatatcgacctgatcctgggctccaacttcgacctgctctacaagctcaagaacatggaggtggacgcgatcctcatctccctcgacgaacacgcccacgaccccgactgcgagcagatcgcgctgttcagcgatgacatcttcctcgccaccccggccgattcacccttggaccgcaatcaggaaatcgacctggccgacgtgcgcgatgccaccttcatcaccctcacccagggcttcgccacgcatcaggacggcaaccgagtgttccatcaggcagggttcgaaccgaaggtggcgatgcaggtgaacgatatcttcaccttgctgagcatggtcagttcaggggtgggttatgcgctgctgcctgggcggatcgcggcggtgtatgagaaccgcgtgaagctgataccgctgcagcccaggtatcggttgcagcagcagatcggtgtggtgttcctgaaagccaaggagcgtgacccgaacttgctggcgttgttggcggagtgtcggatgtatgccaatcgccaggtttgagaccgccatcgcaggcaagccagctcccacagcggaccgagatcacctgtgggagctggcttgcctgcgatgaggcccgacctgtcagcccaccaacccacgcatcaacaaaaacaacaacgaaggccccagcaagcaccccagcgccgtatagaacgccgccgtcaaacacccataaggcaccagcttcggatctgtcgccgccaagccgcccgccacgccgctggaggtgcccatcaagccaccgaagatcaccgcgctacgtgggttgttcagcccgatcagcggcgccacgaacggcgtcatcaccatcaccaaaatggccttgatcaaccctgcggcaatggacagcgccatcacctcggagctggccccaatcgccgcgccagtcaccgggccgacgatataggtcacggccccggcgccgatggtggtgaggcttaccgcatcggtgtacccgaacgccatcgccactcctacaccggcaacgaacgacgagcccacgccgacaaacagcgccagcacacccacgaagccggcgcgtttcaactcatcgacactcacgccaaacgccgtggcgacaatggcaaagtcccgcaacatcgcaccacctagcaggccgatgcccgacaacagtggaatatccaccacgcccttggaaccaccggtaaacgcaccgcccacatacgacagcgccaaccccagcagaatggcaatggccgaaccatgcaggcggcccttggtgaaggtatcggagatccaataggacacccacatggtcaggccgatcacggcaaaaccactgatcaagccgtagccggtaatcactttcatcatcgattcgtacatggcgatcacccggcttctttggtgggaacaggagcaaccggctcgcggttaccgatacgcaccagcaccggcaccagcgcaaagccaagcaccacggcgagagtgccggccagaatcgccataggcccaccgctgatggcgccatacacgttttgctgggcagccatcgccaccacaatcgggatatagatcgcggcccagaaactcacgccttgctctgacttgccggtaaacaagccgcgtttgctcaggtagctgcccaggccgatcaacagcagcatggcaatacccaccccgccgacgttggccggaatacccaacagcttgcccagcagttcacccacaaacagccctgccaacgtgcagaacgccaaaaaagccacaccgtagataatcatgttgttgtcctcaaagtgctcgttcgaaattgttgtttttgtgcttcgaaagccttgggtactgcgttatcggtggcggcgctcctcctcttgcagcagggcctgcaaggtgtccaggcgggcgccttcgcaggcgatcaccgtgccttgttcaaacacccggcgtgatagaccggtgagcaccgcacccggaggcagttcgatctgcagccgcacaccgcgctcgtaggcgctttgcacagtgccgcgccaatcgacgacgcggcacatgttgaaggccaggtcgtcacgcagttgttcggggttgtggataggtcgcgcgcgggtgctgctcaggtaagtgatgcgcggcgcgttgagtgggacgaaggcttggaacagtgcctgggcgggttgctccagcaacgggcaatgggacggcacgctgacggccaggcgcttggcgacgccgttgcctttgatgcgctcggcaacccgcttcatcgcctcgttgctgccggcgatgacggtctggttatcggcattgatattggccaggtacaccggcgtttgcacgctgtggatatccgccagcagcgcttcgacactggacagatcagggccgatcagcgccgtcatgccatagccctgtggataagcctgctgcatcagttcgccacgcaggctgaccagttttatcgcatcagcaaagcccagggacccggcgatcaccgcagctgggtaggcgccgatggacaggcccgccacgtaatccggcgtgcacgccaattgccgcgcatgggccacaccggcgatcaacaggcacagctgcacagcccgcgtcgactcaagcgcctgcgccgaatcgagcagacgaacgtcttcacccagggcatcactggcctcttgcacaatgtcggccggcaacgcctggagcatgccgctgcgttgggcgccctgccccggaaacaccaaaaggctgctcatgccacggcctgccaagggtcgagtacaaggtgcgcaccgctgacggttttgagcagtacacggtgtgaggggccggcccattcgcgcaaggcgacggcgccgaaaggggtttgcagttgcagatcgacggcgcagggcgcagtgtccaggatcgccaacagcgctcgtgcctccctacgatccagatgcttgggcgtacacagaatcaaatccaggtcactgttggcatgcagtgcttcaatgccgctggccagttcaaacccggcactgccgctgacgccccagtcttgctgcgccagcaccggccgcagttgatcgagggcccgcagcgccggtaaatcccgtgcggagggtacgtctcgcaaatcctgcggcaccacccgccgatgcaccgccgccacaggcatccgggcggcaaaacgctgctcacgcacacgcccacgcaccccgaccgccacatggcccggctcggcgatggcgcgccgcaccaccaccggatgcccggcacggatcgcctcccgcacccaggccggagcatccgcaggcagatgcgccagggtcatgccccagagcaagtcgtgggcgttcaccattgctcccgcaacagttggcgcacgtggctggaggcagcacggttggtggcgccgaggcgtgaactcaagtcggtgctgccgatatccttgaccgcctgcaccaggcaatcgctgacccgcgccacgtcatccgccgtgggttgttcaatctgggtgactgtcagcgtctcccacagcaaacccaggctggcatagctgtcgatgtcataggccatcggcggcacgctggcggccagggtttccaattcttcgacgctgcgcaaggtcacccgggcggccgaggctttgcccatggcatgcaccatcacgcctgggtcgcgcagggcaatcaggcgattggcctggtagccgtgagcgaggaacgcgcccgacatggccttgcccaccagcagggcgatcaccgggtggccggcaagccgggcgcgagcgtagctgtcagcagcggcggccagggcctgatgaatgcccagggcttcttcgcggcggccataggcttggctgggtacgtcgacgatagcgatgatgggccgcttgtcaccccgggcgatggcttcgtccaccgccttggccaagccccagccttccagcaggccgacttcaccattgcgggcgcgggggaagcggttgtgcgggtcgggaaccacggcgatatagcgtaccgcctgttcacccaatactccgtccgccactttcaatgagcccggcaaaccttcgaccggcgttgcgttggcgctcaatgcgttgaaccactgcaagcctctcatgagcgttctccctgatacagcgcgcgaaccgccgccggctcgatctgcgccgtggtgtccagttcggccaggcgcgccaggtagaaatcagcgcgccggctgcgaggttgtgagggcacaccttgctgcaacagtgtgctgacggtctgctggatctgcgcgatatcgtccgccacataacggtcggccaagccgctgttgaagcgttgctcgccaccggtaaggctccagataaaggggcggtcgcgggaatcgtattcctccaggcccgcctcctgttcgatcacttgcgggccattcaagcccaggcgtgcttcgcgagtgaccaccaggtagctgcacaagccagccgcgatggacatgcccccaaagcaaccgacactgccggccaccacgccgatcactggctggtactgacgcaggtcgacaatcgccgcgtgaatctcggcaatggcggccaggcccaggttggcttcctgcaagcgcacgccacccgtttccagcagtagcaccgcgcaggtggggatgccgttgcggttgtcttcggcggccagctccaaggcgcccgcgattttcgcaccgccaacttcacccaggctgccgccctggaaattaccttcgatcgcggcaatcaccacaggcttggcgccgatgctgcccttggcgatcaccaccccgtcatcggcctgtggcaccacgccttggcggctgagccacggcgacatgacccgctggaacgggtcgatcaactcgcggaaggtacccgcatccaacagcgccttggcgcgctgccgggcaccgagctccacaaagctgtgtttggcaagtaagtcagtcatggcctacctcctcgaaaccttgctccaggcgcaagcgcactacgccgggcgtggcaccgaagtcgtggatatcaatgttcagggccggcggcgtctgctcctggaagatgcgttcgaacaggtgctgccagcgttgctgcgcgccattgaccgaggtttgcacctggatggtcaaggtgccgggcgtgcccggttccagcagcacttccaggtcgcccgagccgacgcaacccaccaacgcacggcctttgggcggctgcccggcggggaattcaaaggatagggtttgcatcacaacgctccgtcgaggcgatcgataaacaggcaggcggccaacaggtcggcggcgccaccgggggaggcattcaaggccagcagttgcaggtccagctcatgcaattgacggcgtccggccagggttgcgctgccaccggcgtcgagcacggcctgggcgccctgttgcatagcggccaagccttcggtaccggcgcggtagagcacgcaggtgtctgccaggtccgtcatgatcgccagcaaggcatccaggcgagcgttctgctcaccggcgtatgcgcggcggctcttgtgcagctgcggcaggccgcgttggattaccgaggggaagccgagctgcgcttcttcacgggcaccgcgtgcgccgtaccgctgggcaacctgggcgccatggctcatgggctgcggtgcgtaacggtcgttgagcagggccagtttggcggcggtcagggttatggcacggggttccaaggccgccgcagcggtgagcaaacccagcgcccagatcgcaccgcgatgggtgttcacgccctgggtggtagcaagcatggcttgctcgccttcacggccaatacgcccgagcgcttcgcgcaacggcaggccgacttcgccgatgtcgagcgcagcctcggccatttccttgaacgtcggccacagtgacagcgccgaagcgtgcatcagccccaggtgcaaatcgctgtgggcaccattgccacgccggtccaccagcgcaggcttgggcgacaggtcggcttcatcgatcagcgcatcgacggccatatccgcgaggcgatcggcgaggctgagttcatgcagtttgagcgcgcgcatttaccagctcctgaacttggcgggcgggttgtacaggccaccagaccactccaccagatcggccacgctcttggcggccaacaactcgcgggtggcgtcggtgcggcgaatacccaagtcttcgggcaaggcaatcaagccttcgcgacgcatgcgcgcggtgtccttggggttgtggcgcatgccgatggcggtcaccccggcgacggcggcgatcatcgcctggcgttcttccagggagcgcgccttgtacaggtaggcgatgccttcttcggtgagcaagtgggtgacgtcgtcgccgtagatcatgatcggcgccagaggcatgccgcttttgcgtgccacttccaccgcgtccagggtgtcgacgaaggtgggtttgccgccttcctggaaggtctcgaccatctgcaccaccagttttttgccgcgttcaagcagggcttctggcgcatcgtcgtggcgcatatccaaccaggctggggtgccatggcggcggccgcgtgggtcgtggcccatgttcggcgcaccaccaaacccggcgaggcggccacgggtcacggtgctggaatgcccgtcgccatccacttgcagggtggcgccgataaacaggtccacggcgtattggccggcgagttgacagaacatgcggttggagcgcatcgaaccatcgcggccggtgaagaacacatccgggcgtgcggcgatgtagttttccatacccagttcggtgccgaagcaatgcacactttccacccagccgctttcaatcgccggaatcagcgtggggtgtgggttgagggtccagttgcggcagatcttgcctttcagacccagggattcgccgtaggtgggcaagatcaattcgatggcggcggtgttgaagccgatgccatggttgagcgattgcacattgtgtttttcgtagatgccacggatcgccatcatcgccatcagcacatgcaccggcttgatatggcgtgggtcgcgggtgaacagcggctcgatgtagaacggcttgtcagccaccaccacgaaatccacccaactggcgggaatgtcgacacggggcaagtcggtgacgtcatccaccaactggttgacctgcacgatgacgatgccatcgctgaaggcggcgggctcgatcaacgccggggtgtcttcggtgctggcgccggtgtagatattgccagcgcggtcagccatgaaaccggccgagagcaccacgttggggatcaggtccaccaccagccgtgcgtagagttcgatataggtgtggatcgcgccgatttccagcaggccgtcttccagcaactgactgatgcgcagggattgggtgccggcgaaggaaaagtcgagcttgcgggcgatgcccttttcaaacaggtccaggtgctcggaacggccgacgctgggcatgatcatgtgcaaatcgtggagcttggccgggtcggccttggccagggagcgcgagaggaagtcagcctgcttctggttgttgccctccagcaccacgcggtcgccggggaggatcaaggcttcaagggcctcgacgatcttgtcactgggcaacaccgccccgtctgcgtattttttgaccagcccgagccgccgctgcttctcgtcgcgccgccgcgtccagcgcgagtcgggggtgatggttgttgtcatggtcgctccacggggtttgctgtcgtggggcttaccttaggagtgaagcgttaaggcatcaatcaagctggaggacgaaccgttacgcctggagtaacgaagatcaaactgtgggagctggcttgcctgcgatagctgtaggtcagttgcagagatgttgactgacaggccgccatcgcaggcaagccagctcccacattggtcggtggtgttggttagatagcggtcccaaagagggaacgatcagtccctttttgggaccgtttcaaagggtggcgaccgtgcgcaggtgtgcaagaccgggcctgtttaggacacccagcaggtccgaagacctcctgcgcgcagccgccataaaacagcgagcacaaaaaacgcccgtggttggctgggcgtttgtacgcctaaacagtttcgtcggacttgcacgtccttgtcaccgttttttgcgatgacgggacgaagactaggcgcgatgatcaatcacaacaagttcatgcatagcccgatatcttgcaggaaaaatctgagcgccggcccatcacaacaccatcatcaccctgaccttcccaaggccctccagcgcatagctatggtactcatacacttctccctgaataaccagctgcagggcaccaccctcattattgacttgaacatcggactcttttgttttgagaaaaggaggtgctgacactaatgcgctgagtatttcctgatcacttcccaaatccttatgcacgtagtacctgtaggaaaaccccaccgtcgcgccaccttggccatctcgcgcaccatagatcgacataccgttgcccagggaatgcttcaacaccacttcatccaggtccggtgttccgggcgccaggacccaactgccgccgatatagagcaggcagatcacaagcaggcaattacgcagcacaggtatgagccgcttagtggccttgcgaaatggcatattcgatacctcttcttatccaataatggtcccgtgggtcgtcaccaaaaggctcaccgccccaccatgatccaaaatccggacgagtcgttctggcgacggtttgagccacaccggcggctcgcagcaacacattttcgggaatgcccagcactgtgcctgtggcaccgtaattgaagttaccaaaagcttcgtactgacgcctctgcttcttatagttccaagggccggccgcacggacctgggattcaaaccaggaataggcgaatgccgagccgggcttgagatgaatgcgtttggattgggatatcgccatgttttcaagagttgaaacaccgggcggcattaacggcacggccatttgcgagtccttgccggcagtgaggagtgcagaaactagccactccactgcggcctgaaaacccacctattccaaattcagaactcgcctacagcaactccatcctattccgacattcatcgattatttgcacgctctgcgtggattgattgagacctggagatgagcgcagctcagtgtgggagcaactgtctttaaggcttttaactgatcgttcccacgctccgcgtgggcatgcatcctgtgacgctctgcgtcacccttgtgctgactggcaggacgcggagcgttcccggcggcattcccacgcggagcgtgggaacgaacagtcatagggctcaggatcaggccaggccggactctaccagcagcgcttcaaggcccattaaatccggcaccttcgccacctgctcgcccacttgcaccgccgccagttccagtgggcatagcggcacatccacgtagctcaattcgctatcaagcttgtacgaacgcggaatgccctggatcaccagcgcgatgaatttcaatgtcggtcgcccacccagtgcattcaacaccacgatgcgcgagcgttcacccgtcatgctggcttcgccgcaggccgcctcaaagctgatcagcggaatttgccgatcgcgccaggtcacttgccgcaggtaccacggcggcgcatcgctggcgggttcgccgcgctggaagtcgatcagttcggccacggcaacgttgggcagcaccaggtggcggtcggccaggggcagcagcagcccggtgagttggctggtgcggtgctcaagcatgggacttgctccagtaggcgatgctttccagcagtaccgactcttggtacggcttgccgaggtagtcgttgacgccaatggccatggcgcggtcgcggtgtttctggccggtgcgtgaggtgatcatgatgatcggcaagcgcatcaggcgtgggtcgttgcgtatctggatggccacttcgaagccgtccatgcgcggcatttcgatgtcgagcagcatcaggtccggggtgtgttcttccaggatggcgagggcgtcgatgccgtccttggcggtgagcacgttcatgccgttgcgctccagcaggcggctggtgactttgcgcacggtgaccgaatcgtccaccaccagcaccagcagcggacgttttttcagtggatcgttgaggatcagcggcgcatccaccgcctgggccggcaaggccggttgccgggcgcggatgtgcgccagcaggtcgatgatcagcaccacatggccgtcgcccaggatggtcgcgccggtcacgccttgcaccccggagaactgcggccccaggcccttgaccacaatctcgcgggtaccggccatggcatccacatgcaccgccacgcggcgttcattgcagtgcaccagcagcaccggcaccggctggtactggcccagcagtttcgggcggctggcggtgtgcagcaggtcgcctaagtagaacaactcgtagcgctggccggcgtattcatagtgcggtgggtcttgctggtagtgcccggccaattcgtggggcagcacgcgcaccaggccttcgatggtgttgagagggatcgcgtattggtcgtccgcgcagtgcaccatcagcgcacgattgaccgacacggtaaacggcaggcgaatgcgaaaatgcacgcccatgcccggcgtcgagtcgatcaccatcgagccgccgagctgacgcacttcctcatgcactacgtccatgcccacgccgcgcccggaaatctgggtgattttttctgcggtggaaaagcccggttgcaggatgaactgcaacacgtcacggtcgctgatctcttgatggggcgcgagcaggccgcgcttgatcgccttgcgtcgcaccgcttcgaggggcacacccgcgccgtcgtcacgcatgtcgaagacgatgtcgccgccttcgtgagtcaggtccagggtgatgcggcccttctcaggtttacccgccgccagccgcacttcgcgggactccaggccgtggtcgacggcgttgcgcagcatatgctccaagggtgccgccatacgctccagcacattgcggtccatctcgccttcggcattgccgacgatgaactccacgtctttgcctaattcgcccgccacttgccgcacgatgcgcttgaggcgtggcaacatgcgctcgaaaggcaccatgcgcgtgcgcatcaggccttcctgcaactcggtgttgatgcgcgcctgttgctgcagcaggttgtgggcatcctggttgcggcgctcaagggtgtccttgaggtcgagcaggtcggaggcagattcggacagcgcacgggccagctgttgcagctgcgagtggcggtccatttccagcgggtcgaattcttcgtagcccaggcgttcggcctcggcctgctgacggctcaggaggcggccctgggtttcgctgtcgagccggcgcagttggtcgcgcatgcgttcaatggtggtttccatctcactcaaggcaatgcgcgcatccttgacttgctgctcgatacgcccacggaagatcgaggtttcgccggccaggttgaccaggtcatcaagcaagtcggcggagattttcaccatgtcggcagccgggtcggcgaccgcttcggccttgccagccggcagcgccaccggtgtgaccggctcatcactggggtgcaccaggctcttgatgcgctcgatgagtttatccaccgaacccaccggcaacccctcggccacggcgtcgatcatctgcgccaggcggtcatggcagccttgcagcagtgcgaacagttcaggggtcggcgcgagcaaaccggcggacagcccttcgtagagaaattccagctcatgggccagatcgccgatcggcccgatctcgaccatgcgtgcaccacccttgagggtgtgcaggtcccgcagcagggtttccacttcctggcgactgcccggttcggcctgccagcgcaggagcgcgctgcctgaactgtcgaggatatcggcggcttcttcgaggaagatatccagtaattccgggtcggcacccgaggctggcgtcacagcggccggagctgccgggctgctggcctggcgcaattcccgcagcctttcgaccagttcggcaccgtcactcaagggttgctgctgttgcagctcgtccaactgttgggccaagcgctcatggctggccatcagtgcctgggacagctcgacagaatagctatagcggcggtccaccagcccctcataaacgcattccagctcatgggccaagtcgcccaccgggtcgatttcggccatgcgcgcaccgcccttgagggtgtgcaggtcccgctgcaacgaggacaagggcgcagcgttttcgggttccagcaaccagcgcttgagcgactggccggcgctgtcgaggatgtctacggcctcttcaaggaaaatctcgacaatctcgtcgtccatcgcggtggcgtgatccagctgcgcagtggccgcgcccaactcggcgatactcaggccgcggctgccgtcgcttttgatcaggcccgtggcggacgggtccagtgcttcatcgagcaactcgcgcaacgcctgcagccgtgcgggcgcggggctgatttcctggccggcggccaactggtcgagcatgttgatcagcgcgtcatgggcctgttcggcctcctggaaaaaccgggcgctgaccgccaggctgctttcttctaccgcgccatacaggtcgagcaaggcttcgcacaacgcgtcgataggatgcagatcggcaaggtgcgcgccctcgcccagggtggtcagctcgtccagcaacgccgtgagttcctgacggtcgccagggtgttgctgccagcgacgcagcaagctttcggcgtcgagcaggatgtccatgccctgggccaggaagttggtgatcaagtgcgggtcacgcttgacgcgcaggccggccgtgggcgcgtcgagcaaggcggcgagttgatgctccagcaggcgttgggtgcggctgatcaggtcggccgcgccgttgatcggcgccagtggattgtggtccaggtcacccagcccgcgctggaacagcgcttgtgcttcaagcagcaacgccacttcgtccttgcccagcggcaggcggtgggccttgtattcacgggtgaggtggtccagcgggcgcgccagttcggcgatgggcaacacgccggccatgtaggcgctgcccttgagggtgtgcaaggcgcgttgcagttcatcgctgacctgcagcggcacctgctcggcggcctgttgcaggaagtgctcgaggctgtccagatggccctgggcttcgttgcggaagatctccagcagcatcggatcatggggctcggtggccgacgtggcggcgccactggccagggcatgggcacgggcggccaaggcgtccacttcatcgcgctggcgttggtcgtcgctggcaaaatcggcgatcagctccggcagcagggccacggcctcatccaacacctgctgcacctcagggccaaggattacgctgcgttccagcacgcgattgagcaggttctccacggcccaggccagctcggccagcaccagggcgcgcaccatgcggccgctgcccttgagggtatggaaggcgcggcgcatttcgccctgggcggctttgtccgtgctgtcgggcaggtagcgatgcaacacgtcgaggacttcatcggtttcttcaaggaagacttcgcgcagctcatcgtcaatcggttcttcaccggccggcggcggcaacaggctgcccggtcgctgcaaggccggagggttgagacgtgaggtggggctggccagcgcatcgaactgggactggctgggtgcggcctcggacagtgcgccctcgggcgcaaccagggcctggcgccaaggtttttccaccggcaggtagcccaacgcattcaagccctgggtggccaactccagcactttttcccccgccgcgtcagggtcttggagcatgcgttcgaggtaatactccaggctgctgaccacctcggcgaaatgcgccagttgagccgccgaaggagcggcctggttgatcatcaattgctcatcgacgtaatcggtgcaaccgcgcatcaagctcgccgcgcgcggcaaaggaatcatcgccagggcaccgcgtacctggctcaacagctcgggcaaggactcaaggcgctgacggtcccagtcggcctcgatgcagtcgatcaccagctccttggcttggcgcaggcactggcacgactcgcgaatcaccagctggtgaatctgggtcaggtcggtggtgggcaagcggctgtcttcacggctttgcggttcgacggtgccgatcatccccgccaatgtcgcttcgacatacagcaacgcgccggccacatccatcaacaccgcgtcattgggttcgcgctgcccctggaccaggctcaacaccaccgcgagttggtcgatgatcactttgcgcggctggccgaaacccagcaccgcgagggtatcggcgatctgccgcaacggcgccagcaatgggtcgaggtcttgggtgtgctggcgatcactgcgcacgaacagatccaggcgttccttgacccgcaccagctcctcacacaacgccccgagtaccgagcccatggcattgcgatccggcccagccagccgcgcacgttcagcatcgaccacggcgctgtcgggcaaggcttcgtccaagccgtagcgttccttcaggctttgcatgcgcggcgtcggccgggtgactttggcgacgtagaacaacaggctcttgagcaactcatccggcgccggctggttgatgccattgacgccttgaaccagcaagcgcttgagttgtttatcgctagccttgagcaggctgcgcagcgccgggctgttggcgaccacgccggtgagcatgccttcgaccagcgccgaggtgacctgccacaacggcaacagcggcgcgccctggcacagcgcttcgaggcgtgcgaacacccgggccatgtcttccaggttgctggggccgtggtcttcacgcagcaacccggcaagggcttgttgcagcaggtggcgccattggcgcaactgctcatgcagatccggcgttgcccgttgggccagggcttgctcaggcaacggctcgatcgacagtagttgcgggctgaacaggctggtttccgacagcaggctttcaccacgggcgctgcgcaggtcgttgagcagcggcagcaccaccagtggcaggtcgcggcgggcactgtgcacgcggtcgaggtacagcggcaattggccgagggcttgttgcagcaggcggatactttcatcgcgctggccgacatgcccggcctgtagcgccagggccagttcttcgatctcttcggccaacagcgccgcgccgtagaactcgaccatttgcagcgcgccatgcacctggtggataccggccaggcattcgttgagggcgtcgtcgacctgggtttcaacgtacgcgtccagggccgaacgggcctgcttcagggtttcggcaatatcgcccttgacccattcgagggccacgtagtcgtgccgatcaaccataactgctccgcttagaattcatgagttgctggtatctcacaaacaatggagatccaatgtgggagctggcttgcctgcgatagcggtgggtcagcactatatctgtatctgacaaaccgctatcgcaggcaagccagctcccacagttggactgtggtgttgttcaggtcgtatttcaatcatcgacctgcttgggcggcggcaaggtgaaacccgataccgacctgcgcaactggctggccatcttcgccaggttaccaatgctctcggcggtggcggtggaacccgacgaagtctgcgtggtgatctgctggatcacgttcatggtcagggaaatctgccccgccgatgaggtctgttgctgcgccgcgttgtaaatgctctggatcagcgccgccagggttttggacacgccttcgatctcttccagcgccaccccggcgtcctgggccaggcgtgcgccgcgcaccacttctgtagtggtctgctccatggagatcaccgcttcgttggtgtcggcctgaatggtgcgcaccagggtttcgatctgccgggtggccgccgaggagcgttcggccagccgttgcacttcatcggccaccaccgcaaagccgcgcccggcgtcaccggccatgctggcctggattgcggcgttgagggcgaggatgttggtctggtcggcgatgtcgtcgatcaggctgatgatgtcgccaatttcctgggacgactcgcccaggcgcttgatgcgcttggcggtgtcctggatctgttcgcgaatgttgtccatgccgtggatggtgttgtgcaccacctcgttacctttgttggcgatctctaccgaacgttctgctaccgcagaggattcggccgcgttggccgatacctgatcgatggactgcgccatctggttgatggcggtagacgcttcggcaatctgctgggcctgatgctccgacgcctgggccaggtgcatggcggtggcctgggtgtcctgcaccgcgcccgcgacctgcccggccgtgagattgatggtggcgaccaggtcgcgcagttggtccaccgaatagttgatggagtctgcgatggtgccggtaaagtcttcggtgaccgaggcggtgacggtaaggtcgccgtcggccaggtcttcgatttcatccagcaggcgcatgatcgcgttctggttgcgctcgttcttctgcgcggtttcatgcagttggcggttggtctcgcgcaccatgaccaggccgatcaggatgatcgaggccagcgccagcaagcccagcacgtaaccgccgatggtgtctaaactgcgcccgctggcgaggttttcaaaaccggtggccaggtgcgaagcttcatcgagcagggtttgcgacaagttgaaaatattgctcgccgaggcgcgcacctggaacaactgcggcgaagtctcgagaatttcatccacggagccggagacaaattcgaacagctcggcaatgtccgccagccgcgcccgggcgtccgggtcttcgacctgggtgatacgcaaccccgggttgccgttgagcatgccattgagcaccgcgccaaaacggttggcatcgcgaccgaaggcatcggcggcctgcacggcggtttcatcccccgccagcaccgtgttgaccgcccccaggatacgttcggccagcagcgactggcgttgggccaaggccacctggctggccggggcgccgcgttgcagcaggctatccacgaccttttccgactcgatctgcagttgcggcacggtttcggccagggtcgccgccacctggtgcaacgacaacacggtctgctcgctggccaggatggcgtcggtgtttttcagcagcgcctcccagtcggtctgcactgcccgcatttcggcgcgtaccgcactgggcgccgccggcaaaccggtttgcgggtcaccttttttcaggtagccccagcgctgggcaaaatcgttgcgcgcatcgcccagcagcttgaacgccgccgctttgccggcagcggcctcggtggcgttcttggcaatgcgctgggacagcacgcgcagctcaccggcgtggccgatgtactgtttatcgtaggtggactgggtgttgaggtacgcgaagttggcgaacagcaacatgatgaacacgatcaaggcgataaacagcacgatgatctgcgaacggctgcgcgaagcggcctggggtttgggcgtggtagcggtgctcatgcggcaacatccatgaagccaggggcctgggccagggcgaaggggctgaagacttgccacggcgggtcgccgtcgaactggccctgcataaacggcgcgctcgaggcggtgctcgccacccaggcgtccaatgggaaatgctgcatgcctaccacctcatctaccagcagcccgacaaacaggtcgttgaactccaccaccagcacccgccgttgcttgcgcgccttggacaactcaaggccaaggaacccgcccaggtccatcaccggcagcaagcgcccgcgcaagttggccacgcccttgacccaaggcttgacccccggcatcaaggtgcagcgcggctcatgcaacacctcggcgacttcgcccatgggcgccacgtaggcgtttggccctatgcgaaaggcgataccgctccagcgttgcaggcgcgtttcctgggacggcaggtccgcggccagcaagcggcagcggcggtcgatgtccagcagcagctcaaaagcggtttgcgactcggtcatgatcgcaagccttagccggccagcaccttgttcagggtggcgatcagggtttcttcatccaccggcttggtgaggtagtccttggcgccctggcgtttgccccagactttgtcggtgtcctgatccttggtggtgatgatgatcacggggatatcgctggtttcgggcgacttggacaattggcgtgtggcctggaagccgttgaggcccggcatcacgatgtccatcagcaccgcgtcgggcttttcctggcgggccagggccacgccattccctccgttctcggctttcaggacttggtggccgtgcttttccagcatgccggtgagtttgtacatttcagtcggcgaatcgtcgacgatcagaatacgtgccatggttttccccgctacattggtcggcgccagccctcgtgaggcggcgtcagtgtgcttgttctactgcggcgaacccaggcacataagccttgatcgcccccagcagttcttccttgctgaaaggcttggtcaaaaattgatcgacacccacaatgcgtcccttggccttgtcgaacaggccatccttggaggacagcatgatcaccgggatcgacttgaacgccgggttgttcttcaccagggcgcaggtctggtagccatccaggcgcggcatcatgatgtcgacaaagataatgtgcgggtgatgatcgacaatacgggccagggcgtcgaaaccgtcgatcgccgtgatgacctcgcaccccatgttcttcaacagcgtctcggcggtgcggcggatcgttttcgaatcgtcgatcaccatcaccttcaaggcgttggaatgctgttccatatctgctctaccatcgccacagcgaatcggttttcggtgtgtactgcctgacgttgcacaggatgaacgccgcaagccttggaattcaagggctgctgcgccgtgccagcctttttagcacagtctcctggcgcaatctatcgaggcacccgcccagtggtttttccttgacccacaacagccgcagcgccactctgacgccacttttatgcgccccaatttgctagaggaaatcccccatgagcgttcgcgtcggcattgtcatggaccctatcgccagcatttcctataaaaaggacagttcgctggccatgctcctggccgcccaggcccgcggctggaccttgttctatatggagcagcgcgacctttaccagggtgacggcgaagcccgcgcacgcatgcgcccgctgcaggtgttcgccaaccctgagaagtggttcgagctttctgacgaaatcgacagcccgctgagcgacctcgacgtgatcctgatgcgcaaggatccgccgttcgacatggagtttgtgtactccacctacttgctggagcaggcagaacgtgcgggcgtgttgatcgtcaacaaaccgcagagcctgcgcgactgcaatgaaaagctgtttgccaccctgttcccgcagtgcacgccaccgaccgtggtcagccgccgcgccgatgtactgcgtgaattcgccgccaagcatggcgacgtgatcctcaagccgctggacggcatgggcggcacctcgatcttccgtcaccgcgccggcgacccgaacctgtcggtgatcctcgaaaccctgaccgccctgggcacccagcagatcatgggccaggcctacctgccggcgatcaaggacggtgacaagcgtatcctgatgatcgacggcgagccggtggattactgcctggcgcgtatcccggcagccggcgagacccgtggcaacctggccgccggtggtcgcggtgaagcgcggccgttgtcggacaaggaccgctggatcgccgctcaagtcggcccgaccctacgggaaaaaggcctgctgtttgtcggactcgacgtaattggtgagaacctcactgaaatcaacgtcaccagccccacctgtattcgcgagatcgacaatgcatttggcacgaatatcggcgaaatgctgatggccgccattgagcgcaagctaaaagccaagtgacatagaacagccggacacacaccaacattgcgttatcatgcgccatctgtgaaacgcgcgatgttggttttcttgtcatgacactcccgtccgatctgccccccgaattcacccatagcggcgtgcgcccggctgatcgtctcggttttaccctgtttctcgctgcgctgattcacctcgccctgctcctgggcgtggggttcaccctggtggaacccaagcagatcaccaagaccctggaaatcaccctcgccacgttcaagagcgaaaagaagcccgaaaaggctgactttctcgcccaggacaaccagcaaggcagcggcaccctcgacaagaaagccgtgcccaagaccaccgaagtggcgcccttccacgacaaccaggtcaagaaggtcaccccgccgccggcgcccaagcccgaggtcaagcaggccgcgcccaaggctgcggtaaccaccgtcgcgcccaagccgcaaaaagccccgacccagcgcgaaaaagccaagaccgaacccaagcccgaaccggtgaaacctgcgccgacgttcgacagctcgacgctgtccgacgaaatttccagcctggaagccgaactggcccatgagcaacagctgtatgccaagcgcccgcgcatctaccgcctgaacgcggcctcgaccatgcgcgacaaaggtgcctggtataaggacgagtggcgcaagaaggtcgaacgtatcggtaacctcaattacccggacgaggcgcggcgccagcagatttatggcaatttgcgcctgctggtgtcgatcaaccgtgacggctcgctgtatgaagtgcaggtgctggagtcctccggccagccgctgctggaccaggccgcgcaacgtatcgtgcgtctggccgcgccctttgcgccgttcagcggcgacttgaacgacgtggaccgcctggaaatcatccgcacctggcggtttgccaagggcgaccggttgtccagcaactgatcgcgcccgcacttcagatcgttcccacgctccgcgtgggaatgccgccacggacgctctgcgtctgcccttgggacgcggagcgccccgggatgcgttcccacgcggagcgtgggaacgatcagcgatcaggcgcgcgcccgcacttgtcagttcgcccctccaacgccacactagcggacatgaaaaacgtcagcccgacctacctcaagcaccaattcctgatcgccatgccccatatggccgacccgaactttgcgcagaccttgacctacatcgtcgagcacacggccaatggtgccatggggctggtggtcaaccgcccgcaggagctgaacctggcggatatccttgagcaactgcgcccggaaatcgacccgccggcaagctgcctgcacgtgccgatctacatcggcgggccggtgcagaccgatcgcggttttgtgctgcaccccaccgggccgaagttccaggccacggtagaccttgaaggcgtgtcactctccacgtcccaggacgtgctgtttgccatcgccgacggcgtcggccctgagcaaagtgtgatcaccctgggctacgccggttgggaagccgggcaactggaggccgaactggccagcaatgcctggctgacctgcccgttcgacgctgacatcctgttcaacaccgccagcgaactgcgcctggaagcggccgcggccaagctgcgggtcaacctcagcctgctgaccagccaggcggggcacgcctgatggctttgcgtctgatcctcggttttgactacggcaccaaacagatcggcgtcgcggttggccaggtcatcaccggccaggcccgtgagctgtgcaccctcaaggcccagaacggcgtgccggactggaaccaggtcgaagccctgattaaagagtggaagcctgacgcagtggtggtcggcctgcccctgaacatggatggcaccccgagcgacatgtgcctgcgcgccgagaaattcgcgcgccgcctcaatggccgctacaacctgcccttctatacccacgacgaacgccttaccacctttgaagccaagggtgagcgccgtgaccgtggcgggcaaaaaggcagttaccgcgacaacccggtggacgccatcgccgccgccttgctgttgcagggctggctggatgaaaacaccgctttatttgaatcctgacggacgcggcttgctgctatgccgtttttgtaggagcgagcttgctcgcgaagaactcacaggcaccgcgcacttccaggttttcacgcgttatcgttgacgtttttcgcgagcaagctcgctcctacacacttaacaaggagccaccatgagcttgccgaaccctgccgaactgatcagccagatggcgatacgcctcaaggcgcacctggaacaccgtgccatcagcgaaccgcgttttatcggcatacgcaccggtggcgtgtgggtggcccaggcattgctggaagaactgggtagcgattcgcccctgggcaccctggacgtgtccttctaccgcgacgatttcagccagaacggcctgcatccacaagtgcgcccatcggccctgcccttcgagatcgaaggccagcacctggtattgatcgacgacgtgctgatgagcggccgtaccatccgcgccgccatgaacgagctgttcgactatggccgcccggccagcgtgaccctggtgtgcctgttggacctggacgctggcgagctgccgatcagcccggacgtcgtaggcgcgaccctgtcgcttgccccccagcaacgggtaaaattgtccggtcccacgccgctcgaactcgaactgcaagaccttgccctttaaaccgccttgtaaagagtccccgcgatgacgcctctagatgccaagcgcccgctgcagctcaatgctcagggccagttgcaacacttcttgtccctcgacggtttgccccgcgaactgctcaccgaaatcctcgacaccgccgactcattcctggaagtcggtggccgagcagtgaagaaagtcccgttgttgcgcggtaaaactatctgcaacgtgttcttcgagaactccacccgcacccgcaccacctttgaactggcggcccagcggctgtcggccgatgtgatcacgctgaacgtgtccacctcgtcggcgagcaaaggcgaaaccctgctcgacaccctgcgcaacctggaagccatggcagccgacatgttcgtggtacgccacggcgactccggcgctgcgcactttattgctgagcatgtgtgcccgaacgtggcaatcatcaatggcggcgacggccgccacgcgcacccgacccagggcatgctcgacatgctcaccattcgtcggcacaagggcagctttgaaaacctctcggtggccatcgtcggcgacatcctgcattcgcgggtagcacgttcgaacatgctggccctcaaagccctgggttgcccggatatccgcgtgattgcgcccaagaccttgttgcccatcggcatcgaacagtatggcgtgaaggtctacaccgacatggccgagggcctcaaggatgtggacgtggtgatcatgctgcgcctgcaacgcgagcgcatggccgggggcttattgcccagcgaaggtgaattttaccgcctgttcgggctgaccaccgcacgcctgggcatggccaagccggatgccatcgtgatgcacccggggccgatcaaccgtggcgtagaaattgagtcggcggtggccgacggcccacagtcggtgattctcaaccaagtgacctacggcatcgcggtgcgtatggccgtgctgtccatggccatgagcgggcaaaccgcgcaacgtcaattcgagcaggagcaggcccagtgaagctcagcattctcggcgcccgagtcatcgacccggccagtggcctggaccaagttaccgatctacacctggacgccggcaagatcgtcgccatcggcgccgcccccgcaggcttcaacgccggccagagcatcgatgccaagggcctggtggccgcgcctgggctggtggacttgaatgtcgccctgcgcgagccgggctacagccgcaaaggcaacatcgccagcgaaacccaggccgccgcagccggtggtgtgaccagcctgtgttgcccgcccaacaccaagccggtgctggacacgtcggccgtgaccgaactgatcctcgaccgcgcccgcgaagccggcaattgcaaagtgtttcccattggcgccttgagcaagggcctggatggcgaacaacttgccgaattgatcgccctacgtgacgccggttgcgtagccttcggcaatggcctggaaagctttcgcagcacacgcaccttgtgccgcgccctggaatacgcggccacgttcgacttgacggtgatcttccattcccaggaccgcgacctggccgaaggtggcctggcccatgaaggcgcagtggccagcttcctcggcctgccgggcattccggaaaccgcagaaaccgtggctctcgcccgcgacctgttgctggtagaacaaagcggcgtgcgtgcgcatttcagccagttgaccagcgcccggggcgtggctttgatcgcccaggcccaggcccgtggcttacgggtaaccgcggatgtcgccctgtaccaactgatcctgacggatgaggcgctgatcgacttctccagcctgtaccacgtacagcccccgctgcgcaccaaggcagaccgtgacggtttgcgtgcggcggtgaagtcgggtgtggtgtcggcgatttccagccatcaccaacctcacgagcgcgacgccaagctggcaccgtttggcgcgaccgagccgggcatcagcagcgtggagttgttgctgccattggcgatgacgctggtagaagacggcttgctggacctgccgacactgctggcacgcctgagcgccggcccggccgaggcactgcgcttgccagcgggccagttggcggtgggctcaccggcggacctggtgctgttcgacctggcaagctcgacggtggctggtgagcgctggttgtccaagggcgaaaactgcccgttcatcggccacagcctgccggcgacggtgcggtataccttgatggatgggcggatcagctaccaggcttgataactcgcctatctaatgtggttacggtcaatgtgggagccggcttgcctgcgatagcatcacctcggtctacctgatacaccgaggtgcctgcatcgcaggcaagccagctcccacactgcgctatagtgctcaacggccgctattgcgctcggcattgcggatcgaaatctgcgtgttcaacgtccagaagtcatacagcactccgaccaggaacaaaccgccggtcagcaggtagatcaggccggtgatccatttgccctgatacatgcggtgcacaccaaacacccccaggaacgccaacagaatccaggccacgttgtattcaatcggcccagcggtaaaccgcaggtcggcctcacggtccatggccgggatcaggaacaagtcgatcagccagccaatacccagcaagccgaaagtgaaaaaccagatcgtaccggtcacgggcttgccgtaataaaagcgatgagccccggtaaaaccgaaaatccacagcaggtaaccaatcgccttactgtgggtatcgtgctgctgaccaacctgttgataggtgttcatgaaggacctcttttgcgtcgatagataaattttttcattttctttgtgacttttttacgggcgcccgacgtacggtaaatggtatcttcctgccctcaaagccttgtgccacctgccttgtgtaggacaattgcggcgaatcgtcgcgtttttcctgagtttgaccccaaggttcagtcgacaaacggcctgagaacagcacaaaaagctgttataaagttgcgcgcaaacccataagagccacgcctaatgcgaccatttttcaagacatggctaaccatttgcctattaatgccactggccgcccacgccaccaatcgtgagcaacgacttccgaacgttaacggtttcacccctaaagtccatagcacgcccagcactgccaaatcagcaaagccaaccgtcagccgcccgacccaactgagcaaggtcaacggcaaagcgctttccacccaactggcagtgaacaccaagcaaagcagcaacgtcttgagccgtgccgtcaacgtgctcggtacaccttatcgttggggcggcagcagcccaagtaaagggttcgactgcagcgggctggtgaaatatgcatttaacgatgtgaaagcggtagacctgccccgcacttccaacgccatggcagccggccacgggttgaaggttgaccgcaaggacctcaaaccgggcgacctgttgttcttcaagctcaagagccgccaggtcaaccacgttgccatctacctgggcaacgaccgttttatccacgcaccgcgccgtggcaagtcggtgagcatcgacacgctgaaaaagccgttctgggacaagaactacgtaattgccaagcgggtactgcctaaagagcagaacagcaacctgcggatcgtgcagcgctaagccaggcaccactgaagctccccatttgaaatgcaatcaaatgtgggagctggcttgcctgcgatgacggtgtgtcagttggcagagagagtgcctgacagcccgctatcgcaggcaagccagctcccacattgtgtgtctgtgcgttttagatatctgccggcaccctcgccttctcccgcgcctcttcccggctgaccagccctgcgccgaccaacgccttcaaactcatatccagggtcttcatccccaacgccccacctgtctggatcgccgaaaccatctgcgccaccttgtcttcgcgaatcaagttacgaatcgccggggtgcccagcatgatttcatgggccgccacgcgcccaccgcccactttcttcaccagcacctgggacaccaccgcctgcaacgactccgacagcatcgagcggaccatcgccttctccccggccgggaagacgtccaccagcctgtctaccgtctttgccgccgacgaggtgtgcagggtgccaaacaccaggtgcccggtctctgccgccgtcagcgccaggcggatggtttcaaggtcgcgcagttcacccaccaggatcacatccgggtcttcgcgcagggcggaacgcagggcctgcgagaaactgagggtatcgcgatgcacctggcgctggttgaccagggccattttcggcctgtggataaactcgatggggtcttccagcgtgaggatatgctggcgacggtgtcggttgaggtcgtcaatcatcgccgccagggtcgtggacttgcccgagccggtgggcccggtcaccagcaccagcccgcgagggaagcgggcgatacgctggaacacctcgcccaacctcaggtcttccaggctctggacctcagccggaatagcccgaaacaccgcacccacgccgcgatcctggcggaacacgttcgcccggaaccgggcgacgcctggcaactcgaaggcaaaatccgtttcaagagatgtttcgaaatccttttgttgatgtttattcagcaaagggctcaataagtcgaccacttgggtagcgctcagcgccggcccatccaggggccaaacctcgccatcaatgcgcagcatgggtgccaggccggctgacaaatgcaggtctgaggcgcctcggcttacgctggccgtcagcaattgcgtgatatccatagggctttccatttccagtagaatgccgcggactccatatccacgggcgcatcttgaatgtcgacgatagcagacaacatcggcctggttagccagcgcatccgcgccgcagccgacgccgtgcaacgtgacgcaagcagcatccacctgctggccgtgagcaagaccaaaccggcgcaggcagtgcgcgaagcctatgccgccgggctgcgcgactttggtgaaaactacctgcaggaagccctgggcaaacaggcggaattaaccgacctgcccttgagttggcacttcatcggccccattcaatcgaacaagactcgtgccatcgccgagcacttcgcttgggtgcactccgtggaccgcctgaaaatcgcacaacgcctgtccgaacaacgcccggccgacctgccgccgctcaatatctgcatccaggtcaatgtcagtggcgaagccagcaagtccggctgcacgcccgctgacctgccggccctggccacagcgatcagcgccctgccgcgcttgaagctgcggggcttgatggcgattcccgagccgacgcaagaccgggcggagcaggatgcggcgttcgccacggtgcgcgacttgcaagccagcttgaacctggcgctggacacactttccatgggcatgagccacgaccttgagtcggccattgcccaaggcgccacctgggtgcggatcggtaccgccctgtttggcgcccgcgactacggccagccgtgaaatggctgacatccctcgaaataaggacctgtcatgagcaacacgcgtattgcctttatcggcgccggtaacatggcggccagcctgatcggtggcctgcgggccaagggcctggacgccgagcagatccgcgccagcgatcccggtgccgaaacccgcgagcgcgtcagcgccgaacacggtatccagaccttcgccgataacgccgaggccatccacggcgtcgatgtgatcgtgctggcggtcaagccccaggccatgaaggccgtgtgcgagagcctgcgcccgagcctgcaaccccatcaactggtggtgtcgattgccgctggcatcacctgcgccagcatgaccaactggctcggtgcccagcccattgtgcgctgcatgcccaacaccccggcgctgctgcgccagggcgtcagcggtttgtatgccactggcgaagtcaccgcgcagcaacgtgaccaggcccaggaactgctgtctgcggtgggcatcgccgtgtggctggagcaggaacagcaactggatgcggttaccgccgtttccggtagtggcccggcctacttcttcctgctgatcgaggccatgacggccgccggcgtcaagctgggcctgccccacgacgtggccgagcaactggcggagcaaaccgccctgggcgccgcgaaaatggcggtcggcagcgaggtggatgccgccgaactgcgccgtcgcgtcacctcgccaggtggtaccacacaagcggctattgagtcgttccaggccgggggctttgaagccctggtggaaacagccctgggtgccgccgcacatcgttcagccgagatggctgagcaactgggcaaatagtcgtcccttaccaaggtaatcaaacatgctcggaatcaatgacgctgccattttcatcatccagaccctgggcagcctgtacctgctgatcgtactgatgcgctttatcctgcaactggtgcgtgcgaacttctacaacccgctgtgccagttcgtggtgaaggccacccaaccgctgctcaagccgctgcgccgggtgatcccgagcctgttcggcctggacatgtcgtcgctggtgctggcgctgttgctgcagattttgctgttcgtggtgatcctgatgctcaatggataccaggccttcaccgtgctgctgttgccatggggcctgatcgggattttctcgctgttcctgaagatcattttctggtcgatgatcatcagcgtgatcctgtcctgggtcgcaccgggtagccgtagcccgggtgccgagctggtctatcagatcaccgagccggtgctggcgccgttccgtcgtctgatccccaacctgggcggcctggatatttcgccgatctttgcgtttatcgcgattcaactgctgcagagctgggtgattccacgcctggcctactttgcctacatgccaaaagagttgtttggcctgatctgaatgccgtagcccctatgggggtggcttgcctgcgatagcatggcttgtgctgatcgttcccacgctctgcgtgtgaatgcagcccgtgacgctccgcgtcaccagggcaggacgcagagcgtcccaagaggcattcccacgcggagcgtgggaacgatcacgctaacccccgaccattgcttgccgctagggtccccgctctttagacttacgcctcatttaaacgagagcagggtcgatgccagctgccttcccccccgattctgttggactggtcgtgccacaagtggcgcatttcagcgaacccctggccctggcctgcggccgttcgttgccagcctacgacctgatctacgaaacctatggccaactgaacgccacggcgagcaacgccgtgctgatctgccatgccttgtccggccatcatcacgccgccggtttccatagcgttgacgaccgcaagcccggctggtgggacagttgtatcggccccggcaagcccatcgacacccataagttctttgtggtcagcctgaacaacctcggcggctgcaacggttccaccggccccagcagcctcaacccggaaaccggtaagccgttcggcgccgacttcccggtgctgaccgtggaagactgggtgcacagccaggcacgcctggccgacctgctgggcatcagccagtgggccgccgtgattggcggcagcctgggcggcatgcaggccctgcaatggaccatcacctacccggaccgcgtgcgtcattgcctggccatcgcctcggcgcccaagttgtcggcgcagaacatcgccttcaacgaagtggcgcgccaggcgatcctcaccgaccccgacttccacggtggttcgttccaggaagcgggcgtgatccccaagcgtggcttgatgctggcgcggatggtcggccacatcacctacctgtccgacgattccatgggcgagaaattcggccgtggcctcaagagcgagaaactcaactacgacttccacagcgtcgagttccaagtggagagctacctgcgttaccagggcgaggaattctcagggcgctttgacgccaacacctacctgctgatgaccaaggccctggactacttcgacccggccgccaaccacgatgacgacctggcaaaaaccttcgagcacgccacggccaagttctgcgtgatgtcgttcaccactgactggcgcttttcgccggcacgctcccgtgagctggtggatgccctgatggccgccaagaaagacgtctgctacctggagatcgatgcaccgcaaggccacgacgccttcctgattccgatcccacgttacctgcaggcgttcagtaactacatgaaccgcattactttgtgagaacgccatgagagccgacctggaaatcatccaagactggatccccgccggcagccgcgtgctcgacctgggctgcggcgacggcgaactgctgagctggctgcgcgaccacaagcaagtcaccggctacggcctggaaaacgacccggacaacatcgcccagtgcgtggccaagggcatcaacgtgatcgagcaggacctggacaagggcctgggcaactttgccagcaacagcttcgatatcgtggtgatgacccaggccctgcaagcggtgcactacccggaccgcatcctcgacgaaatgctgcgcgttggccgccaatgcatcatcactttccccaactttggccactggcgctgccgctggtacctggccaccaaggggcgcatgccggtctccgacttcctgccctacacctggtacaacacgccgaacatccacttttgcaccttcgaagacttcgaagccctgtgtggcgagcgtgaagccaaggtgatcaaccgccttgccgtcgatcaacagcaccgccacggctgggcgagtaagctatggcccaacctgttgggcgaaattggtatttaccgggtcagcagtcctggcctgaccgaccacaaagttgccgtctaatcatcttcaagagggacgttcatgagtcgtttggctatttttctattgaccgcatgcctgggcgccagcgccatggccgccgacactatcgacgctaatcgcaaaaaagacttcggcgatatcaccgttcattacaacaccttcacttcaagcttcctgcccgctgagaccgcccaaaaagtcggtgtggtgcgcagcaaggagaagggtttgattaacgtgaccgtgatcaagggcgtaagcccggtggccgcgcaagtcactggcacggtcaaggatttgggcggcaagagcgagatcctgacgttcaagcagatcgaagagaaaagcggcatcagctacctcgcgccctactcggtgacccagcgggaatacaagacgtttaccatcaacgttgaaaccggcggcaaggcccacggcttccaattcaaccaagaactgttcccggccgaatgatgaaccttacccaactcgtactcgccagccacaacgccggcaaactcaaagaactgcaagccatgctaggtgagtctgtgcacctgcgttcgattggcgagttcagccaggtcgaaccggaagagaccggcctgtcgttcgtcgagaatgccatcctcaaggcccgcaacgccgcacgtatctctggcctgccagccctggcagatgattcgggcctggccgtggatttcctcggcggcgcgcctggcatctactcggcccgttacgccgacggcaaaggtgatgcggctaataacgccaagctgctcgacgccctcaaggacgtgccggaggccgagcgcggcgcgcagttcgtctgcgtgctggcgttggtgcggcacgccgatgacccgttgccgatcctgtgtgaaggcctgtggcacggccgcatcctgcaggcggccagcggtgagcatggctttggctatgacccgctgttctgggtgccggagcgtaatgtctccagcgccgaactgagcccggccgacaaaaaccaaatcagccaccgcgcccgcgccatggcgttgctgcgccagcgcctaggtttgaaatgacccagaacacctctgcgcagccgctgatccacggcggcgcgcaaacaccccgggcgacgctgccccacctgccgcccctggcgctgtacatccatattccgtggtgcgtgcgcaaatgcccgtattgcgacttcaactcccacaccgccagtaaggtgctgccggaagaagagtatgtggacgccttgctggcggacctggaccaagacctgcacgccgtttatggccgtgaactgagttcgattttcttcggcggcggcacgcccagcctgttcagcgctgctgcactgggccgcctgctcaaaggcgttgaagcgcgcatcccgtttgccgacgatatcgagatcaccctggaagccaaccccgggacgttcgaacaagagaagttcgtggcgtaccgcaagctggggatcaatcgcctgtccatcggcatccagagcttccagcaagagaagcttgaagccctgggccgcattcacaatggtgacgaagccgcacgcgccgccggtatggcgcgccaggccgggttcgataacttcaacctggacttgatgcacggtttgcccaaccagtccctcgacgacgccttgggcgacttgcgccaggctattgcgctcaagccgacgcacctgtcctggtaccaactgaccctggaacccaacaccgtgttctggaaccagccacccgtgctgccggaagacgacacgctgtgggatatccaggaagccggccaggcactgctcgccgaacacggttacgcacaatatgaagtctcggcctacgcccaaccggggcggccggcgcggcataacctcaattactggagctttggcgactttatcggcatcggcgccggcgcccacggcaagctcagccacccggacggacgcatcatccgcacctggaaaacccgtgcaccaaaggactacctcaacccggccaaaagcttccaggccggcgcgaaagaactgaccaacgacgaactgccgttcgagttcctgatgaacgcgctgcgcctcaccgacggggttgatgccaagctctacgccgagcgcaccggccttgatctggcgagcctcgacgaaggccgccgcgacgcagaacaaagtggattaatgcaggtcgaaacgtcacgcctggcggccaccgaccgcgggcaactctttctcaatgacctgttgcagaagtttttgagctgatagctcttaaggaaatcgaatggatctggtactcgacctgctcgccaccgtatcccgctggagccgtagcaacctgtcggaaatctcgttggcccttgtaggctgtttgctggtgctgttcggcgccgacatcaagggctgggtcgaagcacgcctgggcagcatcgccggcgccttgcgcgtacccttgatggccctgctgtgcctgatcggcagcggtgcggcgttgatctacgccacgccgtggattgtgcgggggttgagccagttcaataactacagcctggcaccggtgttgatcgtggtgctggtgttgattggcgtcgtcgcagaccgccgctgacccagcaggcactacaaaacacatgtgggagctggcttgcctgcgatgcagacacctcggtgtatcagtggtaccgaggtgatgctatcgcaggcaagccagctcccacattggattgcgtttcaagcggatgactgtttaagccagcttctcgaacttcaaatcccacaccccatgccccaaccgctcgccacggcgttcgaacttggtgatcggccgctcggccgggcgtggcacgcatttgccgtcttcggccaggttgcggtagccaggggcgacgttcatcacttccagcatgtattccgcgtacggttcccagtcggtggccatgtgcaggatgccgcccactttcagcttgctgcgtaccagctccgcgaaggaggcctggacgatgcggcgcttgtggtgacgggccttgtgccatgggtcggggaagaacagcatcaggcggtcgaggctgttgtcagcgatgcagcggttgagcacttcaatcgcgtcgcagtcgtagacccgcaggtttttaaggccctgggtcagcacaccgttaagcagtgcgccaacgcctgggcggtggacttccacaccgatgaaatcctgctccggcgcggctgcggccatttccagcagggaatggcccatgccgaaaccgatttccagggagcgtggggccgaacggccaaacacttggtcgtagtccaccggcgcgtcggccagaggcaacacgaacagcggcgtgccctgctccaggcccttttgctggccttcggtcatgcggccggcgcgcatcacaaaactcttgatgcggcggtgcttggactcgtcgccctcttccacggtgttcggcgtttcgtttgattcagtcatcaatagctcttacttgatcagaccatccagcggcgaagaggcgctggcatagagttttttcggcatgcgcccggcgaggtaggccaggcggcccgcgacgatggcgtggttcatggcttgggccatcatgattggttgctgggcatgggcaatggccgagttcatcagcaccgcgtcgcagcccagttccatggcgatggttgcgtcggaggcagtgcccacgcccgcatccaccagcaccgggatcttggcttcttcaaggatgatctgcaggttgtacgggttgcagatgcccaggccggaaccgatcagaccggccagcggcatcacggcgatgcagccgatttctgccagttggcgcgcgatgatcgggtcatcgctggtgtagaccatcacgtcgaaaccttccttgaccagggtttcggcggccttgagggtttcgatcacattggggaacagggttttctggtcggccagcacttccagcttcaccaggttgtggccgtcgagcagctcacgggccaggcggcaggtgcgcacggcttcgatggcgtcgtagcagccagcggtgtttggcagaaaggtgtagcgctgcggcgagagcacttcgagcaggttcggctcgccctcgatctggccgaggttggtgcggcgcacggcgaaggtgacgatctcggcacccgaggcttcgatggccaggcgggtttcttccatgtcgcggtacttgccggtgccgaccagcagacgggactggtaggtacgaccggccaggacgaaaggcttgtcgctacgaacgatgctcatgggaaatcctctggttggatgaggttctgcagaatgcgttgcggccgtggcaggctagccgccgccgatggcgtggaccacttcgacctggtcaccttcggtgagcgcagtctcggcgtgctggctacgcgggacgatatccaggttgagctccactgcgacgcgacgcccggtcaggtccagacgggtcagcagggccgcaacggtttcgccatcgggaagttcaaagggttcgccgttcaactgaatgcgcatgccacgggccgccatcgtttttaggggccagcattctagcgcgattggaacctgaaggtcagctccaagcgtcaagcggtcaaagctgcaagcgccacgccgccaggcccaggaagaaccagccaagcaggaacgccagcccgccaaacggcgtgatgattcccagtttactgatgccggtcatcgtcagcacatacaggctgcccgagaacagcaggatgccgacggtgaacgaaattcccgcccaggtgaccagccggcccggaatatgcgccaccagcaaggccacgccgaacaatgccagggcatgcaccaactggtaggtcacgccggtatggaagatcgccaggtagtcggcgctcaggcggtttttcaggccgtgggcggcgaacgcgcccagcgcaacgccagtaaagccgaaaaaggcagccagcatcagaaagctacgcagcatggggaactccagtcagactcatcgggcagggtctgtataatggcccgctcaacgggttcggccaagccatctctatgctgcgtgtcctcttcaaacgctttctcaacgtcgtgaaatggtttgccatcggcagtgtgttgctggtgctgctgtttcgtgtggtgccgccgccgttcactgcgctgatggtggagcgcaaggttgagtcctggatagatggcgaacccattgacctgcaacgcagctgggtgccgtgggatgaaatctccgatgacctgaaagtggcggtgatggccggtgaagaccagcgcttcccgcaacattggggctttgattttggcgcgatccaggcggcgatcctgcacaacgagcgtggcggctcgattcgcggtgccagcaccctgagccagcaggtgtcgaaaaacctgttcctgtgggccgggcgcagctatttgcgcaaaggcctggaggcgtggtttaccggcttgatcgaagtgttgtggcccaagcagcggattcttgaggtgtacctcaacagcgtggaatgggatgaaggtgtgtttggcgcagaggccgcggcgcggcaccattttggcgtgaatgccaaagcgctttcgcggcagcaggccagctacctggcggcggtgctgcctaatccgcgggtgtggagtgccagccatccgacggcctatgtggcacgcagagcggcatggattcgtcagcagatgagccagttgggtggggatggttacctaatggagctgaacactacccgcaaagccccctggtccgactgacacaatacgggacctgtgggagctggcttgcctgcgatagcggtgggtcagtaacccatgttttaactgacacggcctcatcgcaggcaagccagctcccacattaaaccgagttgggcttgagacttttcgaacacatacaaaaatgccccgatctttcgaccggggcattttttgttcgctgcgttttaggcggcgatcgacaacttcagcttgttcattgcgcttttctcaagctgacgaatccgctcggccgacacgttgtacttctgcgccaggtcgtgcagcgtggctttttcttctgccagccagcgctggtagagaatgtcacggctgcggtcgtccagcacttccagcgcttcgtgcaggttgtggttggagttgtcgctccagtcggcgtcttcgagttgacgcgccgggtcgtaccggtggtcttccaggtagttggccggcgattggaaggcgctgtcgtcatccgcttcggcggctgggtcgaaggccatgtcatggccggtcaggcggctttccatctcgcgcacttcacgcggctccacgccgaggctttcggccacgcggtggacttcttcgttgttcagccacgccaggcgttttttctggctgcgcaggttgaagaacagcttgcgctgggccttggtggtggccactttcacgatgcgccagttgcgcaggatgaactcgtggatttccgccttgatccagtgcacggcaaacgacaccaggcgcacacccatttcagggttgaaacgcttcacagccttcatcaggccgacgttgccttcctgaatcaggtcggcctgggccagaccgtagccgctatagctacgggcgatatgtacgacaaaacgcaggtgggcgagcaccatctgccgagccgcccccaaatcctgctcatagtagagactctcggccagttcacgctcctgctcgggcgtcagcaatggaatgctgttgaccgtgtgcacataagcctccaggttcgcacctgggaccaaggcataagcaggttgcaaagaagtggtcatacgaaaaaacctccgactcacataactcgtgcagttcagcactgcgaaaattgacctgggaaccgtaggacaagttccctaaaccgctgatacggtcaatacaaacgaaaccacattaatctggcattaactacttcggcgccagctcacgtaaatgccgtgccaccgcaatccacgcaccgatataccccaacaagaccgcgccaagcaagagactcagaccatcggctaccggcacaccggccaacgcgaaatcactgccgtagagcccggccaagccgacaaccgcgtcgttcaaccaatccaggccaaacgccagtacgccccaggacaagatccccgcacccaggccatacaacgcgcccatgtagaggaaaggccgacgcacatagctgtctgtgccgcccaccagtttaatcacttctatctcggtgcgacggttttcaatatgaagacgaatggtattacctatcaccaaaagtaatgcagacactaataacaccgtcaggccgaacacaaagcggtcacccagcttgaggatcgcggccaggcgctctacccagactagatcaagttgcgcctgttgcaccttcggcatctctgcgagtttttgtcgcagggcttccagcgccggcttgtcgacctcgttcggcgttaccagcaccacgcccggcagcgggttctgcggcagctccttgagcgcctcgcccaggcccgattgctgctggaactcttcaagggcctggtcgcggctgatgtactcagcctcggcaacccccgggatgttcttgatgtcatcgcgcagcgcttcgccttccttgctgctggtgtccaggttcaggtacagcgaaatctgcgccgcccgctgccaggagccgcccaggcgctccacattattaagcaacagcgacaagcccatcggcaggctcaaggccacggccatgaccaggcaggtgaaaaagctgccgatcggctgcttgcccaggcgacgcaggctgtccagcaggctggcgcggtggctttcgatccaggcgtgcaccagggtgccgaagtccgggccgtcgtcttcgtcgtgttttttctttttcggttgcgggtcggccggcttcggagccacccgttcggatactttagggctgcgtgtagcactcatacgccagcctccccatcgccgatcaggcggccgcgttgcagggtgagcatgcgatggcgcatgcgggcaatcagggccaggtcgtggctggcgatcaagacgctggtgcccaggcggttgatgtcttcgaacacccccataatctcggccgccaggcgcgggtcgaggttaccggtgggctcgtccgccagcagcaaagccgggcgatggacgatggcgcgggcgataccgacacgctgttgctggccggtggacaggtcgccggggaagaggtcggtcttgtccgacaaggccacgcgttccagggccgagtccacgcgtttgacgatctcggccttggacagcccgaggatctgcaacggcagggccacgttgttgaacaccgtgcggtcgaacagcaactggtggttctggaacaccacgccgatctggcggcgcaggaatggaatttgcgcattgctgatagtggccaggtcctggcccgccagcagcaacttgccggtagtcgggcgttccatggccagcagcaggcgcaacagcgtacttttgcctgcgcccgaatggccggtgacaaacaagaattcgccgcgacgcactcgaaagctcagctcatgcaagcccacatgcccgttggcatagcgtttaccgacctgttcgaatcgaatcatgaacgctcccgctcggcaaacagtgcctgtacaaagggttcggcttcaaaggtgcgcaggtcgtcgatgccttcaccgacgccgatataacgaatcggcaacccgaactgtttggccagggcgaaaatcacaccgcccttggccgtgccgtcgagcttagtcaatgccaagccggtcagctgcaccgtctggttgaattgcttggcctggctgatggcgttctggccggtaccggcgtcgagcaccagcaggacttcatggggtgcatcggcgtcgagcttgccgatcacgcggcgcactttcttcagctcttccatcaaattgtctttggtgtgcaggcggccggctgtatcagcgatcagcacatcgatgttgcgcgccttggcggcttgcacagcatcgaagatcaccgaagcagagtcggcaccggtgtgctgggcgatcaccgggatcttgttgcgctcaccccacacctgcaactgctcgacggccgcggcacggaaggtgtcaccggcggcgagcatgactttcttgccttcaccctgcagcttcttggccagcttgccgatggtggtggtcttgccagcgccgtttacgcctaccacgaggatgacgaaaggctttttcggcgtgatcaccagcggcgcctcaaccggcttgagcatggcggccagctcagcctgcagggatttgtacagcgcatcggcgtcggtcaactgcttgcgcgcgaccttctgcgtcaggctctggataatcacggcggtggcttcgacgcccacgtcggcggttagcaggcgggtctcgatgtcttccagcaactcgtcatcaatgactttcttgcccagaaacaggctggccatgccttcgccaatactggcgctggtcttgctcaggccctgcttgaggcgggcaaagaatccggttttgctggtttcggttacggcagcggcgggttctggctcgataacggcaggtgcagcgacaaccggtgcaggcacttcgacgacgggcggtacttcagccacaacctctaccggcgccggctcagccactgccggaatcggcggcacgacgtgctcggcctgaacatcctccaccaacgccacgggctcttcggccacgggcagctccaaccagggcttgtgctcgggctcaggctcaggttccggcgcggcctcggcgaccggctgcaacaccggctcagccatcggcaacaccaccggaactggcgtctcggcaaccggttcggcttctattacgggttcaggggtcggttcggcgtgaacctgtggctgttgaacgacggtttcctgcggctttttgcgcagccatccgaacaggcctttcttctcgccagccgcagctggggtcttcttgtcgtcgttggaaccaaacatggagacggctatctcaaggtagcgacgcgccacagggcgcgccggtaaataaaattcgatgcgtaacagactgttttttagccagctcgttcatgcgcaacattttgtaaggcctaaatagggccttcacaagacagccgcagtggccgtccttaagtcggaccagtatcctagcacctcctcgcccgccgacgctaagaccaagcgggcagcccaacaggtttaaaaacgaatgaatgctctagcccgccgcgccgcaggcctgctgttcagcacagtttgtctgcctctctcagctttggctgccgatccacaacccacccatgaattcaccctcgataacggcctcaaggtggtcgtgcgcgaagatcatcgcgcgccggtggtggtttcccaggtctggtacaaggttggctcaagctacgaaaccccgggccagaccggtttgtcccacgccctggaacacatgatgttcaagggcagcgccaaggtcggccccggcgaagcctcgctgatcctgcgcgacctgggcgccgaagaaaatgcgttcaccagcgacgactacaccgcgtattaccaggtattggcccgtgaccgcctgggcgtggcctttgagctggaagccgaccgcatggccagcctgcgcctgccggccgacgagttcagccgtgaaatcgaggtaatcaaagaagaacgccgcctgcgcaccgacgataaccccatgtccaaggcgttcgagcgcttcaaggccatggcgttcccggccagcggctaccacacgccgaccatcggctggatggccgacctggaccgcatgaaggtcgaagaactgcgccactggtaccaatcctggtacgtgccgaacaacgccaccttggtggtggtcggcgacgtgaccccggacgaggtgaaaaacctcgcccaacgttacttcggcccgatccccaagcgtgacgtgccaccggcaaaaatcccgatggaactggccgagcccggcgagcgcctgctgaccctgcacgtgcagacccaactgccgagcgtgttcctgggcttcaacgtgcccggcctggccaccgccgaagacaaacgctcggtacaggccctgcgcctgatctcggccctgctggacggcggctacagtgcacggatctccgagcaactggaacgcggtgaggagctggtgtccgccgcttccaccaactacgacgcctacacccgtggcgacagcctgttcaccctctcggccacgccgaaccagcagaagaagaaaaccgtcgcccaagccgaagccggcctgtggcgcctgctcgatgagttgaaggccaagccgccgaccgccgaagaactggagcgcatccgtgcccaggtgattgccggcctggtgtaccagcgtgattccatcaccagccaggccacggccattggctccctggaaaccgtcggcctgtcctggaaactcatggacaccgagcttgccgacctgcaaagcgtgaccccggaagacatccagaaggctgcacgcacctatttcacccgcgaacgtctgagcgtcgcccatgttttgcctgaggagaccgctcatgagtgatcgcaaaaacagccgcctgatcctgcccggcctgatcgccgtcaccctgatggcggccagcgccgtttacttcttgcgccccagcgagtcggtcgccagccaggccctggacaaggctcaaacggccagcaccctgcaatccctggcggaactggatggcaaggcaccgaccaaccgcaagctcgacgtacaaacctggaccaccgccgaaggcgccaaggtgctgttcgtcgaagcccatgagttgccgatgttcgacatgcgcctgctgttcgccgccggcagcagccaggatggcgacgtgccaggcctggcgctgatgaccaacgccatgctcaacgaaggcgtgccgggcaaggacgtcagccagatcgccagtggcttcgaaggcctgggggccgactttggcaacggcgcctaccgcgacatggcgctggtgaccctgcgcagcctgagcgacagcgccaagcgtgacgcagccctgtcactgttcaaccaggtgatcggccagccgacgttcccggcagactcactggcacgcatcaagaaccagatcctggccggtttcgagtaccagaagcagaaccctggcaaactggcgagcatcgagctgttcaagcgtctgtacggcgaccacccttacgcgcacccgagcgaaggcacccccgagagcgtgccgaagattaccctggcgcagttgcaggcgttccacgccaaggcctatgcggcgggtaacgcggtgattgcagtggtgggcgacctgacccgcgccgaagctgaagccatgacggccaaggtgtccgcgtcgctgcccaaaggcccggctatggccaagatcgcccagccgaccgagccaaaagccggcctgagccgtatcgagttcccgtccaagcaaacccacctgctgtttgcgcagttgggcatcgaccgtgccgacccggattacgcagccttgtccctgggtaaccagatcctcggcggcggcggcttcggcacccgtttgatgagcgaagtgcgggagaaacgcggcctgacctacggcgtgtactccgggttctcaccaatgcaggtgcgcggcccgttcatgatcaacctgcagacccgcgccgaaatgagtggtggcaccttgcgcttggtcgaggacgtgctggctgactacctcaagaccggcccgacgcaaaaggaactggatgacgccaagcgcgagctggccggcagcttcccgctgtccaccgccagcaacgccgatatcgtcggacagttgggcgccatgggtttctacaacctgccgctgagctatctggaagatttcatgaaacaatcccaggccctgaccgtcgatcaggtcaaggctgcaatgaataaacacttgagcgccgacaagatggtcatcgtgaccgccggcccgacgattgcgcaaaagccactaccgccccccactgataaacctgccgagcagccgctcggggttccggagcattaatggccagttcatctcgcccgaaaaaacctgtccacaacgtgcataacggtgtgggccaactgcgcatcattggcggtgaatggggcagccgcaagctgagcttccccgacgtcgtgggcctgcgcccgacgcccgaccgcgtgcgtgaaaccctgttcaactggctcgcaccgtacattggcggggccaaggtgctggacccgttcgctggcagcggcgcgctgttcctggaggcgctgtcccgtggcgcggcccagggccaggcgctggacgccagcaacgtggcggtatccagcctcaaggagcacctgggcacgctgcgttgcaccaccggccaggtgcagacggcggacgcgctgcgctacctggaaacccaggcggcgactgaatacgacgtagtgttcctcgacccaccgttcaaccagaacctgctgccggccgtctgcaccctgctggaagaacgccagtggctggcagcggatgcctggatctacactgagagcgagaccgcgccctccacgctcggcctgccaagtggctggcgcctgcaccgggagcagaagtccgggcgggtgtattacgcgttgtggcatcgcgccctgtaggagcgagcttgctcgcgaaggtcaaacaggcgacacgggctgtctgacagcgccgcgttatcgttaacgttttccgcgagcaagctcgctcctacacggcagcgggtaattcatgattccatctacagaccgcttcaaacccgccttcggcctcggcaacccccacttgcagacactgtgggggccgctgtggcggccgaccacccatatcgaacgccaacgcgagcgcctgtggctggaggatggcgacttccttgatcttgactggcacgggccgcatgacgtgcaagcacccttggtgctggtgctgcatgggctgaccggctcgtccaattcgccctatgtggccggcctgcaaaaagtcctcgccgcccaaggctgggccagcgctgcgttgaactggcgcggctgctcgggcgagcccaacctgctggctcgcagttatcactccggcgccagcgaagacctggcggcagcgattgctcatctgcgcgccaagcggccgttggcgcccgtgtatgcggtgggttattccctgggcggcaatgtgttgctcaagcatttgggcgaaaccggcaaggcctcgggcttgcagggcgcggcggcggtgtcggtgccgtttcgcctggatcaatgcgccgatcgcatcggcctggggttctcgcgggtgtatcagaagcacttcatgcgcgagatgctggcgtatatccgcgtcaagcaacgccagttcctgcaggacggtcgtgaggatgggctcaaaaccctggaggcccttggctccctggaaaagatgcgcacgttctgggacttcgacgggcgggtaaccgcgccgctgcatggtttcatcagtgctgaagactattatcgccgcgcatcgagccgctattacctgggcgatatccgtacgcctacgttgattatccaggcggccgatgacccgtttgtatttgcgcacagcttgcctgacgccagtgagctgtcggcctgcaccgagttcgagttgctggccaagggcgggcatgtggggtttgtggagggttcgctgaagcgccctggttactatctggagcgccggatcccgcagtggcttcaggcccaatacggtcaatagtgtgggagctggcttgcctgcgatagcggtgggccagccaacgttgaggtggctgacactccgctatcgcaggcaagccagctcccacattttaagcaagtgttcacaccgatcgtttagtcgcccgttgctatttcccgagcaggatcagtaatccactcactccacgaccccgcatacaacttacccaacggataccccgccaggctcaacgcaaacaggttatggcacgccgtcaccccagagccgcaatacgccaccaattcctgcggcgggcgcccttgcaactgcgcggcgaagcgctgcttgagctgctcggccggcaagaaacgaccatcgctgcccaggttttcactgaacgcagcgcactgcgcgccagggatatgcccggcaatcggatcgatgggctctacttcgccacgaaagcgcggctgggcgcgggcgtcgatcaaggtcaggtcgggttggcccaggcgtttttgcaagtgttcggcatccagcaatagccgaggatccggcataccggcgaaggtacccggctcaatcacaggcgcgtccaggctcagggggaaaccggcggcatgccaggccttgaggccaccatcgagaataaacacgccatcacgcttgcccagccaggccagcagccaccaggcacgggcggcgtaggcaccggggccgtcgtcatacagcaccacatcggtgtcggcactgatgccccacgcccgcagttgcctggcgaacgtgtccgccgccggcaaaggatgacgaccggtcacgcccttggtcaccgggccgctcaggtggcgctcaaggtcagcgtattgcgcgccctcgatatgcccttcggcgtaactgcacaagccgtagtccgggtcttccagggcaaagcggcaatccaggatcacccacccgctcgactgttggcgctcggccaattgctgggggctgatcagttgggcaagcggcatgactgactcctgtgaatacaaaggggaaaggtcttacttcacttcttccagtgcctgattcaacggcacgtaaaactctttgaacaaggcgtccaccgcctctttggcctgcggcgtgacaaaccccgcctccagcaccagcacctgatacaccccgcgcttgatcgcctcggcgctcaggtgggtggatttttcattggtggtgcacaaaaagcgcacccaggaggtgaggataatccaggcattgagggtcagggcttcggtttgcaccgggtccatattgagaatgccggcgtcgacaaagccttggtagatggcgccgccctggatcaggcaacgctgggaaaaacgcctgtagcatgtagccagttccgggtcgctctccagcaggtgttcgaggtcgcggtgcaggaagcgataacgccacatgccggccaatacggcttgcaggtaaaagcgtttgtcttccaccagcatcccccgcccttggggtgggcgcaggaaactgtctaccagcgcttcatattcgcggaacagcacggcaatgatcgcctgcttgttagggaagtggtagtacaggttgcccggggaaatttccatgtgggcggcaatgtggttggtactgatactgcgctcgccctgctggttaaaaagctccaggctggtttgcacaatgcgctcgctggtctttactcgtggtgccataggggatcagcttctatacacgggatggggcatcttacggcctaacccggccaggataaatctggatgttactgcaatgttatttgacaatttagagcaatgactctaaaaatccaggcagaccaataacaatcggtgccgcgccatgcctgccaacgttgcctacctgcaagattcccaggcactggatcaactccaggacctgttcgacgctcaacgccgcgcctatgccgccaacccgatgccgccggccggacagcgccagcaatggctcaaggccctgcgggatctactgagcgacgaacgccaggcgctgatcgatgcgatcagccaggattttagccatcgcagcgccgacgaaaccctgtttgccgaattgatgcccagcctgcatggcattcactacgcgagcaaacacctcaagggctggatgaaaccttcccgccgcgctgtaggcattgccttccagcccgcctcagccaaagtcatttaccagccactgggcgtcgtcggcgtcatcgtgccgtggaactacccgctgttcctggccatcggcccgttggtgggggcgttggctgccggcaatcgggtaatgctcaagctcagcgagtccacgccggccaccggcgagctgctcaaggcgttgctggccaagatcttccccgaggacctggtgtgcgtcgtgctgggcgaagctgacgtgggcatggcgttttccaagttgcgcttcgatcacctgctgttcaccggtgctaccagcataggcaagcacgtgatgcgtgcggcggccgaaaacctcacgccggtgaccctggagttgggcggcaaatcgccggcgatcgtttcggccgacgtgccgctcaaggacgccgccgaacgcatcgccttcggcaaagctttgaatgccgggcaaacctgcgtggcaccggattatgtgctggtaccagaagatcgcgtggagggctttgtcgaggcctattccaaagccgtgcgcgggttttatccgacgctggtcgacaacccggactacaccgccatcatcaacgaacgccaactggcccggctcaatgcctacgccaaggacgccaccgacaaaggtgccaccctgatcccgctgtacgagcaaggccaggcgcggcgaatggcccacagcctgctattgaatgtcagtgacgacatgaccgtgatgcaggacgaaattttcggcccgctcctgcccatcgtgccgtatcgcggccttgaccaagcctttgcctacatcaatcagcgccctcgcccactggccttgtattacttcggctacaacaaaggcgaacaagcccgggtgctccacgaaacccattccggtggtgtatgcctgaacgacaccttgctgcacgtcgcccaggacgatatgccgttcggtggcatcggcccgtcgggcatgggccattaccacggtcacgaaggtttcctgacgttcagcaaggccaagggtgtgctggtcaaacagcgcctgaacgcggcgaagttgatctacccgccctatggcaagtcgatccagaagctgatccagaagctgtttatccgctgataaccgccaccttcgggacaataaaaacaatgaaccccagcctgactgattcacccgcgctgtcacggcgcggcgtcttgaaaatcggcctgtgtgccagcgccttcctcgccaccgccgggctgggcgccagcctcagcggttgctccagcagtacgccggccagcggctttgcgatgttgcgcaccagcgacttgccgttcttacgggcggtgatcccggtgttgctggaaggcgcggccagcgccgagcacgtgtttgccggcattgaggacaccctgaaaaagctcgattacagcctgcagcacttgtcgcccgagatgttcaaactcactcagcaattattcgacgtgctggcaatgggcatcacccgcggcccgctgaccggtatctggggcagttgggaaaatgccagcagcgaacagatccgcaatttcctgcaccgctgggaaaacagctacctgaacctgttgcgcatgggccagggctcgctgctcaagctggtggtcatggcctggtacttccggcccgagtcctgggcccattgcggctaccccggcccgccgaagatctagcctgggcaatccgccaagattgcatcttcctacaaaaataagagtgcacacctatgcccgtacccgatctgttccgcgacggcctggcccgtggctggaaaacccacaatggcgccgccctggataacgacctgaccctggaagcggatgtcgccatcatcggcagcggcgccgggggcggtaccaccgccgaaatcctcagcgctgccggctacaaagtgttgctgatcgaagaaggtccgctcaagaccagcagcgacttcaagctgctggaagacgaagcctacgccagcctttaccaggaaggcatcgggcggatgagcaaggacggcgctatcaccatcctgcagggccgggcggtgggcggtaccaccttgatcaactggacctccagctttcgcacccctgacgctaccctcgcgcattgggccagcgaatatgcggtcaaaggccacagcagcgccgaaatggcgccctggttcgaaaaaatggaacagcgcctgggcatcgcgccgtgggcgctgccgccgaatgccaataacgatgtgatccgcaaaggctgcgaaaagctcggctacagctggcatgtgatcccgcgcaatgtgcgcggctgcttcaacctggggtattgcggcatgggctgcccggtcaacgccaagcagtcgatgctggtgaccaccatcccgtccaccctggaacagggcggcgaactgctttacctggcccgcgccgagcggctcatctgcagcggcgacaccatcagcagcctcgaatgcgtggccatggacgaacgctgcgtagcgcccacagggcgcaagatcagcgtgagagccaagcactatgtactagcgggcggcggcatcaacagcccggccctgctgatgcgctcggacgcacccgacccgcactcgcggttgggcaagcgcaccttcctgcacctggtcaatttctccgccgggctgttcgacgaggtgatcaaccccttctacggtgcgccgcaatccatctactccgaccatttccaatggcaggacggcactaccggcaaaatgtcctacaaactggaagcaccgcccctgcatccaggcctggcgagcaccctgttcggtggctacggcaagcagaacgccttggacatgaaccaactaccccacacccacgccatgctcgccctgctgcgcgacggttttcaccccgacagcccgggcggcaccgtagagttgcgcggtgatggcacgccagtgctcgactatcaggtctccccctacgcctgggacggcctgcgccgggccttccacagcatggccgagattcagttcgcggcgggggccaaatcggtcaagcccctgcatcacgacgcgcgctttgtgaacaacttggccgaagcgcgcagcgtgatcgacggtttgaatctggaactgcatcgcaccaccctgggcagcgcccacgtgatgggcggttgcgccatgggtgaagagccaaaaaatgccgtggccgacagcctgggtcgccatcatcagttgcgtaacctgtcgatccacgatggctcgctgttccccaccagcattggcgccaacccgcaattgtcggtgtacggattgaccgcgcaactggcgagcgcattggccgaacgtctgaaaacggcatgaaaaaacagggtattcacggcatctatctacataagtcgacttggcccaccggtaatgctgcgataccatccggttccccaacggactccgccaggacgacgcgatgaaccgagtgttgtacccaggtaccttcgacccgattaccaaaggccatggcgatctggtcgaacgcgcctctcgcctgttcgaccatgtgatcatcgcggtcgcggccagccccaagaaaaacccgttgtttcccctggaacaacgtgtggagctggcgcaagaggtcaccaagcacctgccgaatgtggaagtagtgggcttttcgacattgctggcgcatttcgccaaggagcagaacgccaatgtgttcctgcgtggcctgcgtgcggtgtcggacttcgaatacgaattccagctagccaacatgaaccgccaattggcaccggacgtggaaagcctgttcctcacgccgtcggagcgttattcgttcatttcctcgacgttggtgcgtgaaatcgccgctttgggcggagatatcaccaagttcgtgcacccagccgtggccgatgcgctgacgctacgcttcaagaagtaaggctgcccggtcggtgcctgctcgcactgcgggcgccaatgcggcacaattgcgcgcattagttttcagatgccttggcagagtgccctggcaggagtttccatgtccctgatcatcaccgacgattgcatcaactgcgacgtctgcgaacccgagtgcccgaacgccgccatttcccagggcgaagagatctatgtgatcgaccctaacctgtgcacccagtgcgtcggccactacgacgaaccgcagtgccagcaggtatgcccggtggattgcatcccgctggatgaggcacaccctgagactgaagagcagttgatggagaagtaccgcaagattaccggtaaggcctaagcctcttcattgcccgtaagggcctcatcgcaggcaagccagctcccacattggataggtgaataccttcaactgtgggagctggcttgcctgcgataacgatatcagccctcacacagccatcagctctgacaccgagggcaaaacacactcgcccgctgccccagcaccacattgcgtagctcagtgccgcaaaccttgcacgcctcgccaccacggccatacacgaacaattcctgctggaaataccccggctgcccatcgccgccgataaagtcccgcaacgtggtaccgccccgctcaatggcagcggccagtacccgcttgatctcaatcgccagcttcaaataacgcccgcgtgaaatcccgccagcggcgcgccgcgggtcaatccccgctgcaaacagcgcctctgtcgcatagatattacccacacccaccaccaccgcgttgtccatgatgaacggcttcaccgccatcgacttgccgtgagacaactggaacaagcgctcaccgtcaaacaggtcagtcaacggctccggccccagccgcatcagcagctcatggttgtgcgggtcgaggctccagagcatcgcaccgaagcgccgcgggtcggtgtagcgcagggccatacccgattccagctcgatatccacgtgttcatgcttggccgccggcatgccgacttccaccaggcgcaagttgcccgacatgcccaggtggctgatcaaggtgcccacttcagcattgatcaacaggtatttggcccggcgctccaccagcacgatgcgctgccccgacaggcgcacatccaggtcttccggaatcggccagcgcaggcgccgctcacgcaccaccacgcggctgacgcgctggccttccaggtgcggggcgatcccgcggcgggtggtttcgacttctggtaactcgggcatgtgtacctcttgaataacgggtcagtgcgcgcccagttcgcggatcgacaacttcaggctctcgaagtcgtagtccgacaggcccacgtaatccagcaccaggtggccgatggcattccactcatggtccaccgcctggttccccagtacgcgataggacgaacagatatgctcggccatcttcaaaatggccaacaggttcttgagctgtgggttgcgcgacgactcatcgctgaaaatcgccagggcgttgtggtgattggcgatggcgtcggtcacatgctccggcaggcgccaggacttggcggtgtagtagccaaccaccgcatggttggtgtgaaacgctttgttttcagtgtcgaccacgcggcaatccgggcccgcattggcgtaggcctcttccagcaccgccatgtaattggggaagcgcttgagcatcagcggcacgccgcaatcatggaacaggcccaaggcataggcttcgtccacggcctgagaaccggtgcgcttggccagggtgaggcaggtcatggccacatcctgggcggtgtcccagaagcggttgagggtgacaatggtgtcgtcgcacatctcgcccttgatcgactgcgcgttgatcagattgatgatcgaacggctgcccagcaggttcaccgcacgctggatcgaagcgattttgttgctcaggccgtaatacggcgaattgacgatcttgagcagcgcgccggacaagcccgggtcttgggagatcaaccgtgcaatcacttccaggtccgggtcgggcatgtactgctccatctgcaaatccaccatgatttgcggttggggcggcacgctgatgccttgcagggcctgttggatctgctcgggggaaagctcttgggacataagtacacactctgggctaggcgcgaattctaccccttatgccgacatggccgacacccaaaaagccaagtgaaacccgatcgaatgtgggagctggcttgcctgcgatagcatcaccaccgtacgtctgatacaccgcgccgcccgcatcgcaggcaagccagctcccacatgaaagagtgcgcaaagggtatactcccgctcttttttccggagcgacgtcatgtccctgccaagcctgcgtctcaaagccaacgccgatcgtcgtttgcgcaacggccacctgtgggtctacagcaacgaaatcgacgtggccgccaccccactccacggcttccaggcaggcgaccaggctatcctggaagcggccggcggcaagaccctgggcatcgtggccatgagcccgaacaacctgatctgcgcccgcctgctgtcgcgcgacatcaagttgccgctggacaaatcgctgctggtgcaccgcctcaacgtggccctgtccctgcgtgatcgcctgttcgacaagccgttctaccgcctggtctacggtgattccgacctgctgccgggcctggtggtcgaccgtttcggcgacattctggtggtgcagatcgcttcggcgaccatggaagcgcataaagaagacgtgatcgccgcgctgacccaagtgctcaagcccagcggcatcctgttcaagaacgactccgccgcgcgcgacgccgaaggcctcaaccgctacgtcgaaaccgtgttcggcctggtgccggagtgggtggcgctggaagaaaacggcgtgaaattcgaagccccggtgatccagggccaaaagaccggctggttctacgaccaccgcatgaaccgcgcccgcctggccccgtatgccaagggcaagcgtgtactggacctgtacagctacatcggcggctggggcgtgcaagctgcagcctttggcgccagtgaagtgttctgcgtcgacgcttcggccttcgccctcgacggcgtagagcgcaacgccgcgctgaacggctttgccgagaagatgacctgcatcgaaggcgacgtgttcgaagcgctcaaagaattgaaagccagcgaagaacgcttcgacgtgatcgtcgccgacccaccggccttcatcaagcgcaaaaaagacatgaaaaacggcgaaggcgcctaccgccgcctcaacgagcaagccatgcgcctgctcagcaaggacggcatcctcgtcagcgcctcgtgctccatgcacctgccggaagatgacctgcaaaacatcctgctgaccagcgcccgccacctggaccgcaacatccagatgctcgaacgcggcggccaaggcccggaccacccggtgcacccggcgattgccgagacgcggtatatcaagagcattacgtgccggttgttgcctaatagctgattaacatctgaatgggggatccaaaatggatctcccatgatttcattacatctaagccattccgcccgaccgtattttaccgactgcctattaagcatagaataactaccccacgccacttcgtagtaccaatccgacaaaaaaactcgaacattcctacgcgtttttttcttgaaatttcatcattaaatcctattattcaattgtcaccgatgacggcgacactttaattaaatataaagttgaaaataaggagatccaaaatgaaaaatatcaaactggaaacttcccacatcgccaacttggctttcttggtagcactgaaagcccgctaagcaactaaaacgctggggagtgccggctacccagcgtttttccgctccgcacggaggcagtgcaatgcagataaacccttatatatttatactcccaaaaacacctacagcgatagtttggaactataaaaatcacaaacaatacgagctcaatctagaatactcagtacgactcaccaaactgataaacgatccaaaaatcttcgacaattcaaacccaatagacactcagctattagaagccgaaattttgacagacacaccttctccgccaattaattggggctgggatgagttatcaaaaattttccatattggcaccaaaaacataccttgcgatcaaatgcccgaaaacgcagacgaatgggcgagcatctacctagaccattgtacaaaaacattatcaacacctccccctccagaccgaatacacaaacacaaagctgacactccattaattcgcttgccagcacctatcaacctgtcagagaactcacttcaaagtgcattgctcacccgaaaaacctgccgttcattcacaggcgaatccgttgccctgcaaaccataagtacaattctttacttgtgcttaggacacttaaacgaaagagcaaacaatgttgatgaaagtattgcgaaaggactcgaagcccgaaggagcagcccttccggtgggggattaaacgcgtgtgaaggtttcctttacgctaaaaatatagatgggttgaagcccggcatttacgcttataacgcatccgagcacactctaagtaccgtcaatacgcaactgaaaacggcattggggcaagtgctttcaggacagcacttcattaacgaactcccggcaggtctcttcatcacttgtcgatttgacaaactctggtggaaatacgagcactcacgagcttatcgaatggcttatgtcgaagcgggtcatatttcacaaacctaccaactggtcgcgacagcgatgggactgagcacttggttaacgggcgcacttacagacaatcaggttgaatccttattaggatttgaagaaaacaatcctgaacaagtcttattttttgtcgggtgcggtaaaagcgacggacaagtgatatgcagggaactaaaatcgctgctaaacaaccgagggtaggaattatggttgagccgctcatcgactctaatctgtggaaagccagcttcactcttggagactggaacacccgcgcatcagtaagaaccagtgattaccaatacaagttacctccagatttagagaaacagctggagtcaagagattggtttcctcccgccctacttccctatcttaaacatccggaagtcaaattagccgacaaagccatcactaagcgtctctgcgccaatcacttagtaaacttcctaaactacacaacactacttgaacaccagatcgttaatcgctccgtagaactaataattcatgacgagcttgaatttacgataccttctcgtatgaaaatagcggcactgcagctttacactgacgaaggttatcacgcgctattctcctatcagcttgccgaacaagtcagtaaattttatgatatggcaactcaatcaactatccacagacgaataacaaaactcaatcagctaatccataccaccccgaataagcagaagtcgatcacgtggcttctaattggtttcgtatcggaaaccatcattgcaaaagatctacgtgatgtttatcaaaaaaacttggtctgctgcgttcagaagatgctcaaagatcacctcgctgacgaggcccgacacagtcgatattttagcgaagtctttcattatttgtggattcagatgagtgacgagcaacgaattttatctgccaaacagctcttagatattatccttattttctttgagacggataaaaaatggctcgaattgagtttacgaagcgtgcaattaagtgagaccactgtcgatcaagtcgtgaccatgatggctgacccgcacgcccatattcttcgcgctcgcgaaggtgccagcaccacatttcaagcattgaaaaaagcaggtttttttaaacgaactgatattcgccagctgttctcaaatgtggggcttatagatgaataagacacgtaccgctaacggtaacaaaaaaagacaaaggtcggcgatcgtgctattaatgaccatggtgttacttggtgttttccctctagatgtcttactcccttctttccccgcactggctgaacactttcaaaataaaccttcggatattgcgttctctattagcctttttgctatcggtatctccctatcacaacttttaatcggaccactctcagatatcgtagggcgcaaggggttgttgattagcgggatggttgtatccattgcaggtgccaccggttgcgtattctctaccgaatatatgtggtttctgatatttagaatggtccaagccatcggttgcggctgcttcgtgctgtcacaggcgttggttcaggatatgtttgaaggtaaagaaagggaccagttgagaattctgatgatcacggcgagtggcatttttatttcaatatctccgctacttggtagtgtactgcaacagctttttgactggcctggcagcttttttctttttatcgtattggcccttggcgttttgtcaatcgcgtattttttactagacaatcatcatgtaaactctcatccaaaagaagatattttctgcgcttatcaacgggtactcagcaaccgcagtttcgtcggttactggctaattgcagcaattgctttcgcctgccacttttcattcatcgtcatatcaccgctcatcttcatggatcagttgcagctatccacttatgaattctcactagccttgctactttacggcgcggcgtatattgctggcggcatcgtagctcgcatactcgctaataggctggcgcccaaggttcaaatcgtgctcggtttggccctgattttttgttctgggctattgatgctctttttttcaagcacttttgagctttcaacgatgacagtattaatcccaatgatcgtctgcaccaccgggactaccatttgtcggcccatcgctacctctaaagctatggacgtgtttccggaaaatgcaggcaccgcggcgtcggctgggaacactttaatttttatactgggtggattgattagcgcattgatcaacatgagtacagataacccgcagatgaccctggcattagcttttttgctgctgagtacagcggccctcgtgttgaattcgttgatttcacgtcgcctggaattgctgaacgtcggttgaacccgccaatacacatacgcccattccctccagccgccagcggtgtagaatcggccctattcatcgccagtcatcccccggcgggtttatgagctcgaggcccaagcaagcggcgatcccgcgatgcgagtggcaactaccggacacacggccattttctgagtgttccagtcgtcaattagaagctcactcccctttagtacttgattagccgcccggagtgctccaatgcctgattaccgctcgaaaacatccacccacggccgcaacatggccggtgcgcgcgcgctgtggcgtgccacggggatgaaagatgacgacttcaagaagccgatcatcgcgattgccaactcgttcacccagttcgtgccgggccatgttcacctcaaggacctgggccaactggtcgcccgcgagatcgaacgcgccggtggcgtggcaaaagaattcaataccattgccgtggacgacggcatcgccatgggccatgacggcatgctgtattcgctgccgagccgcgagatcatcgccgactccgtggaatacatggtcaacgctcactgcgccgacgccattgtgtgcatctccaactgcgacaagatcacccccggcatgttgatggctgccttgcgcctgaacatcccggtgatcttcgtctccggcggcccgatggaagccggcaagaccaaactcgcctcccacggcctcgacctcgtcgacgccatggtaatcgccgccgattccagcgcttctgacgagaaggttgcggaatacgagcgaagcgcctgcccgacctgcggttcgtgctccggcatgttcaccgccaactcgatgaactgcctggtcgaagccttgggcctggccttgccgggcaacggttccacactggccactcacagcgaccgcgagcagttgttcctgcaggccggccgcaccatcgtcgagctgtgcaagcgctactacggcgagaacgatgagtcggtgttgccgcgcaatatcgccaacttcaaggcgttcgaaaacgccatgaccctggacatcgccatgggcggttccaccaacaccatcctgcacctgctggccgccgcccaggaagccgagatcgatttcgacctgcgcgacatcgaccgcctgtcccgtcacgtgccgcaactgtgcaaggtcgcgccgaatatccagaagtaccacatggaagatgtgcaccgcgccggcgggatcttctcgatcctcggctccctggcccgtggcggcctgctgcacaccgatctgccgaccgtgcacagcaaatccatcgccgaaggcatcgccaaatgggacatcacccagactgacgacgaagccgtgcacaccttcttcaaggccggcccggccggtattccgacccagaccgcgttcagccagtcgacccgttgggacaccctggacgacgaccgtgaaaacggctgcatccgcagtgtcgagcacgcctactcgcaagaaggcggcctggccgtgctgtacggcaacatcgccctcgacggctgtgtggtcaaaacggcgggtgtggatgaatccatccacgttttcgaaggccgcgccaagatctacgaaagccaggacagctcggtacgcggcatcctcgcggacgaagtcaaggaaggcgacatcgtgatcatccgctacgaaggccccaaaggcggcccgggtatgcaggagatgctttaccccacgtcctacctgaaatccaaaggcctgggcaaagcctgcgccctgctgaccgacggccgtttctccggcggcacgtcgggcctgtccatcggacacgcttccccggaagccgctgccggcggcgcgattggcctggtgcaggatggcgacaaggtgctgatcgacattccaaaccgctcgatcaacctgttgatcagcgatgaagaactggcggcacgccgggttgagcaggacaagaaaggctggaagccggtagaaaagcgtccgcgcaaagtcaccaccgcgttgaaggcctacgccctgctggccaccagcgccgacaagggtgcggtacgcaacaaagccatgctcgacggcctgtaagccccgcgcgtaaaaatgccccgccaggtgcggggcatttttttgcctggccaaagcctccacaacaccgaggatcaactgtgggagctggcttgcctgcgatagctatgggcctgccggtgagttcttgtttggcacaccgccatcgcgggcgagccagcccccacattggatataggtaatttcttagaactgtggggtgtaggtcatggtgaacatcacattgcgtgggtcgccgtagtagttgctgccccagttcgcgttgtaggccgggatgtaatacttcttgtcgaacatgttgttcaggtttgccgccacggtgaattcctggttgatcttgtaggccacccgcgaatcccacagtgcattgcccggcacgctgaacgtacggtcataggcttcggtgctgctttgcgcggacacaccggcacccacgctccaatgctgccaatcgcccggcaactggtaatcaccccagaccttgagcaagtgcttgggggtccaggtgctgaaaatcttgccttcgtaggtgtcgtccttgagaaattcagtggtgttgtaggtgtagctggaggccagctgcaggcctggcagcacctcaccactgagtgtggcttcaaagccttggctgcggaccttgccagaggcgaccgagcagtaccaaccattgcagttcattggcccttgcaggtcctgcacgctacggttttcctgatcgtaacggaagatcgcaaacgaggtattgaggcgcccgtcagccagctctcccttgatgcccaactcgtagtttttgccctcgataggcttgagcagggagccggaggtggtcaggttggtttgcggctcaaaggcatcggcatagctggcgtacgccgaccactgctcgttgagcgcatagaccaggccggcgtagggcgtaaccttgccattggactgggtggtattgtcttgcggggcaccatatgtgcctttgaaaccactttggccaatgtaggaatagtcataccaactggtacgcgcaccgacgatcaacgtcagcgggtccaggactttcacacgccaggtgccatagatgcctttctggcgaatgtcataccagctcttcgaggcggcaccctcctggaacaattggtatttgtcgcgctgtgggcggttgtggtcgatgttgaagatatccgcgccgggatttgaagcccgtgcccactggtcgtcggtggtgagcttggaatagttggcgcccagcaccacttcctgctggaagcccagcccctcaaacttgccgtttacatacacatccgcgccgcggctcttggtattgaagtcggtgatccaatccacatagggcacagtgccaccgccgacgggtaccgtgtcccacgtcgcctggtaggttgcgtcgttgtgctcatccatggctaccagtgcggctttcactttccagttatcgttgaagcggtgctcgatgtcggcaaacacctgagtctgattgttgacgctgcggttccaactggcgccgacaaatgtcgaacgtggcagaccgatatcactgccgtcggcataacggggcaacgacatgaagttggggcgcgaatgacccttctggttactgatgcccaggccgacggtggtgtcgggagtgaaatcgtagtcgacggcgccataaaccgtctggttccagccgcccgcatagtcgacgaaggagtcggtggtgtcgtaatccgccacgaagcggccgcgcaaggtgccttcggcgttcagcgggccaccgacatcgacctgagtgccgtagtggtcccatgagccagccttggcggtaatggtcgccgtcggcgcttgctgcccgcgcttgcgcaccaggttcatggtgccgccggggctattggcaccttgcagcaaggcggccgggccgcgcagcgtctcgacgcggtcgtaaatggccatgttttcggtgagatagctgcccaaggtgtaagtgttacgtggaattcccacaccgtcgtattgcagggtgccaacctcgaaaccgcgggagaagatgaacattccggagccgggagacttggtcgctgtcaggccgggcgtgcgcttgaccacttcagagagcttggtggtgttctgatcatccatctgcttgcgggtcatgacgctgaccgactgcgggatgtccttgagtttttgttcgcccttgcccagggtcacggcccccgtggtgtacgagcccgtgccttcggtggtgacgcccaggcgttcggccgtgatggtggtggcgcccacttccagggcattgcctgctaccacacgtttttccagggtgacggtatcggcattgataaacgccgcgctcagccccgtgccgccgagcagttgcgccaaggcttcacgctgccccaggttgcccttcacacccggcgatatcaccccctgggtcaactccccattcactagcacctgaacccgcgtcaccgccgagaacgccgccagcgcagcgtccaggccctgcccggcaatatcgaagcggtaggtctgggcctggttggcctccgcggcctgcaggtacgacggcgcgatacagctggccaaggaaatggccaaggccagcaagggccgtgtggcgaatcggtgtgccatgaatggtgctccccggtacaaaaagtctgtgatcggcgccgcactacttgagagtgcttactatttacgcctcagtgatcaaggacgatggcttacggggaaaccctgaaaatattttgagaaattgccgtcaggacgcattgccttcacgcaacaccagcaaatacggggtgtaatgctcggcacgcaggttgagggtgtattccagcgccttgagcacggcatcgggtttgtcgatttcgaacacgccggacactacccgattgcgcaacgcatcaccgagcaccagcgtcttgccgggccagtagcggttcagctcagagaccaccaccgacaaaggttgctgacggaacaccagttgccgctgacgccaggcaaagccgctggcctggtcgaaaccgtggacgtcggcaaggtgctggccctgatactccacggcccgccccggttccagatagaccggtgtgccgctccctgcactgacctcaaccttgccctgcgctacctgcacacgcgtctggtcatcacgtcgcgtcacactgaactgggtgccgaccactttcacccagccgtcgcccgactgcaccacgaagggccgcgcggggtccttggtcacatcgaagaaaccttcaccacgcagcaaacggatctgccgctcacccccactcatgcggatttgcaccgcactgtcggtgttgagttgaaggtgggaaccatcggccagttcgatgctgcgcgactcgccagtggcggtggcgtagtcggcgcgcaagcggtcaagccagggagtgctttgcacggtcaggcccacggccagcaacacggcagccgcatacgcccagcgccgcagcggtgtacgccaggtggcctgctcggcacggcgaatgacgcgcgccggctcacgcaggccgccaagcatcgcctgcacttcctgccaggcatcatcctgcgcctggccctgcccgagccacgcagcaaaggcgtccatttcagccggggtcaagtcctcggcgtgcaggcggaaataccagccggacgcctcttcgaacaacacatcagcagtaggcagggcagtcatgaccgacgtccttgtgcatcgcaggctaggcgcgtcttgatgtacccacggcattcaatcaaggcgcgacgcaattggtattccacactgcgcgggctgatcgacaggcgttcgccaatctcgcggtaggaaagctcgtcgacatgatagagcaggaagatctgccgagtcgcctcgggcaggcccaggatcgcatcctgcatcagtcgctcctgctgataggcggccagttgttcgtcggctccggggttgctgcagggcagttcttcgctcggtgcgccggcatccaggcgctcgcggcggatagcctggcgctggtggtcgcgcaccaggttgctggcaatggtgaagaggaacgcgggtaggttatcgatcttctcgccggactccaggcgcgccaggcgcaggaaggattcctgggtcaggtcggcagccacctgggcgctgccggtgcggcgcgtgacgaaggcttcgagggctttcttctgctccgcgaacaggcgcgcgatctgcgtattccaggaggacacagcactaccttgagaagaacggacggttcagggagtgcgcacgctagcaaagaatgagattagttcgcaattgatatctattttgcctttgagtcggcggtgttcttaagaccgccttcgcgggcaagcccgctcccacagttgaccgcatttcaggttgaaactcggtcgaatgtgggagcgggcttgctcgcgaaggcaggtgactcggtcttactggatatcttccggcttgacgatcacccagttcttgtccgccgtcaccggcaacccttccttggcttgagccgccgcgtgcttggcgatcatgccgttgagctgggtcatgtatttgtctttgcggttgatccacaagtggacgccgcccttggccacgtccacatcgtggaacagcatgtagccgtcgctggtgggtgtgtcaccgccgacaatcactggttttttccattcgtcgatataggtgaggatcgccgcgtgcttgccggccatccaggtcgccggggtccacaggtaaggggtcagttccaggccgaggttgctcttctcgtcatacttgccggcagtgatctgtttgcgtgcggtggtcagctcgccggtcttgcggtccttgagcatcgtggtcacgccgatgacgttctcgggtttgacgttgtagccgtacttcggatcagccgcgaccatgcgcaccagctcctcggacgcggcggtcatcacatagaccttgatgccgttttccatcagcttgttgtacagctcggcctggccggtgaagactttcggcggctgtacctcggattttttcaccacgtcgccttcgaaatagctgaccggcacgggcttgccggaggccatcagctcgtcgacctgcactttgagttccttgagggtgaagccggaaaaaatctgcgcaacccaggggtagcagaccatgtcgtcgacttcgcacagacgataatagtagctgaacagactttccttatgatcggcggtgtctttgaaggggataagcttgagcgaagggtccatggtttcgcgggtgatcaggcccttgttttccatgaacggcagcagcgactcttcaaggtcgtaacggtagctggtgttgtccatgtcgaacaccgcgtagttacccttgttggcgttggcggcgatcatttcgttgagctgtttggcggcaggtgccggccagtgtttcaactcggtggcggcaaacgcctggctggcaagcccgaggcaaaaggcggcggataccaatagtttcggcgcgagcttcataggcgttgtctccctcaagtgaaagacatcgacgctaacaaatccgtatgacagttatcgcccgagcacgacccaggacgtcgtgatcacgccaagggcatacgcctgagcgtcaaacccttattccaaaaacgacagttaccattccatatcggtattaaatcaatatatttcaagctgttaggcttcccggttcgcaatcgcaggctcacgcgattggctgccttctcaacggagcttcaatgaatctgcccctgattctcaatttattggtgttcgtggccctgttgttgggcctggcacaaacccgccgtaccaactggagcctggccaagaaggtgctgttcgccctggtgctgggcgtgctgttcggcgcggcgttgcacacgatctatggcgacggcaacccggtgctcaaagcctccatcggctggtttgacctggtcggcaacggctatgtgcaactgctgcaaatgatcgtgatcccgctggtgttcgcctcgatcctcagtgccgtggcgcgcctgcataacgcctcgtccctgggcaagatcagcttcctgaccatcggcacgctgctgttcaccacggccatcgcggcgctgatcggcatcggcctgaccaacctgttcggcctcaccgccgaaggcctggtggccggcacccaggaaatggcgcgcctgcaagtgatccagagtgattacgctggcaaggttgccgacctgaatatcccgcagttgctgctgtcgttcgtgccggccaacccgttcgccgacctggcccgggccaagccgacgtcgatcatcagcgtggtgattttcgccgcgttccttggagttgccgcgctgcaactgctcaaggacgacgtggaaaaaggccagaaagtccttaacgccatcgacaccctgcaagcctgggtgatgcgcctggtgcgcctggtgatgaagctgaccccctacggcgtgctggcgctgatgaccaaagtggtcgccggttccaacctgcaagacatcatcaagctgggcagtttcgtggtggtgtcgtacctggccctgggcctgatgttcgtggtgcacggcctgctgctgtccctggccgggatcaacccgctgcgcttcttccgcaaggtgtggccggtgctgaccttcgccttcaccagccgctccagcgctgcaagcatcccgctgagcattgaagcgcagacccgtcgcctgggcattccgcaatccatcgccggtttcgccgcctcgtttggcgcgaccatcggccagaacggttgcgccggtctttaccctgccatgttggcggtgatggtcgcgccgaccgtgggcatcaacccgctggacccgctgtggatcgcgaccctggtggcgattgtgaccttgagttcggcgggcgttgccggcgtcggcggcggtgcgacctttgccgcgctgatcgtgctgccggccatgggcttgccggtgtcactggtggcgctgttgatttccgtggagccgctgatcgacatgggccgtacggcgttgaacgtgaatggttcgatgacggccggggcgattaccagccagatcatggggcagacggataaagcgctgttgaatgccgatgagcatgccgagttagcgcaggtctgatagaccgccatcgcaggcaagccagctcccacatttgaatgtatccacacatcaaactgtgggagctggcttgcctgcgatgcttttaggctttttcccacacttcgaagctgtaggccggcttatcaccttcagccggattctcgacattcgacaccagcttccactggttcctatcaaactctggaaaccacgcatccccttccgggctcagcgccacgcgggtcaggtacaagcgatcggcctgttccagcccttgcgcatacaactgcgcgccgccgatcagcatcagctcgtccacgccttgcgccttggcccactcctcagcccgctctaccgccgcgtccagtgaaggaaaaacttgcgcaccttccagcacaagatcggtctgacggctgaccaccaggttcaagcgccccggcagcggtcggcccagggaatcccaggtcttgcgccccatgatgatcggcttgccgagcgtggtggccttgaaatatttgaaatcccccggcaaatgccagggcatgctgttgtcgacgccgatcacacggttttcaccgagggctgcgatcaggcttaaagggagagtttttttcatggcgacgagaataccagagcggcgagccagcggttatgctccaacctcatcaacacgacaggacggcgcgtgactgcactgaacccgctgcacagactttggctgacagaaaccgtgcgcctgcgcgaagaacacgctggccccctggaagacctggaagccaaccgcctggcccgcaccgccgggggcgacctgccctcgcgcatccagcagcgtgcgctgcacctggccgagcgcgatggtttggccgccgcactcagccgctggctgcaaggcgcacgcctggcgctgttgttactggcggcggtcgccgtcatcagcggcgccggtttggcgttcgccgcgctgggcaatggcctggccccggtgaatgtgttctgggccttgggcagcctgctcggcctgaacctgatcttgctgatcagttgggccctgggcctgctgtttgccggcgaacacagcgccagccttggccggctgtggttgtggctcagcgagaaactggcccgtgacgccaaggccgcgcaactggccccggcgttgttgctgttgctgcaacggcaaaaactcaatcgctgggcggtgggtgtggtggtcaacagcttgtggttgctggccttgctcagcgccctggtgatcctgctgaccctgctcgccacccgccgctacgggtttgtgtgggaaaccaccattctcggcgccgatacctttgtcgccgtgacccaggccctcggcacactcccggctctgctgggtttcaatgtgcccaccgtggagatgatccgcgccagcggcgactccgcgctgaatatcgaaagcgcccgccaagcctgggccgcctggctggtgggcgtgttgctggtctacggcctgttgccgcggttgatcctcgccctgctgtgcctgtggcgatggaaacgcgggcgcgcagcgttgcgcctggacctcaacctgcccggctacgcccaactgcgcgaacgcctgatgcccagcagcgagcgcctgggggtcaacgatgtggcgcccgatcacctgcacccgatcagcggcggcgcaagtgagctggagagtgatggcgccttgctggtcgccatcgaactcgacgaccagcacccttggccccctaaactgcctgccaacgtcaagaacgccggcatcctcgacagccgcgaatcacgcaacaaactgctggagcaactcagccgtttcccacccgcgcgcctggccatcgcctgtgacccgcgccgctcgcccgaccgtggcagcctggcgctgatcgccgagctggcacgcagcgccagcgacacccgcgtatggctgctgcaggcgccaccgggccaggcgctggacgccgagcgcctgggcgactggcatgccgcgctgcaacagcttgagctgtcgtttgccgattgcgcgccgttaagctggctggagaccggtcatgactaaaccgctgaaactcgccgtggtcggccacaccaacgtgggcaagacctcactgctgcgcaccctcacccgcgatgtcggctttggcgaagtgtcccatcgccccagtaccacgcggcacgtggaaggtgcgcgcctatcggtagatggcgaagccttgctggagctgtacgacacgcccggcctggaagacgccatcgccctgctcgattacctggaacgcctcgaccgccccggtgaacgcctggatggccctgcgcggctggcgcgtttcctggaaggcagtgaggcacgccagcgtttcgaacaggaagccaaggtgctgcgccaattgctggcctcggatgctggcctgtacgtgatcgatgcccgcgagccggtgctggccaagtaccgcgacgagctgcaagtcctggccagttgtggcaaaccgttgttgccggtgctcaactttgtcagcagcagcgaccaccgtgaaccggactggcgcgaagccctggcccgcctcggcctgcatgcgctggtgcgtttcgacagcgtggcaccgcccgaagacggcgaacgccggctgtatgaaagcctggccctgctgctggaaaacgcccgcccccagctggaacgcctgatcctcgatcaagaagcccagcgccaggctcgccagcaaagcgcggcacggctgatcgccgagttgctgatcgactgcgccgcctgccgccgcagcgtcaccaccgaggatgagccccaggccatcagtgatttacgcaaggccgtgcgccagcgcgaacaaaagtgcgtcgaagccctgctcaaactgttcggcttccgcccacaggacgccgccgccagcgacttgccgttgctggacgggcgctggggcgacgacctgttcaaccccgaaactctcaagcaactgggcgtgcgcgtgggtggcgggatcgccgccggtgcggccgccggtgcgggcgtggatctgctggtcggtggcctgacactgggcgctgctgccctggccggcgcgattgccggcggtgcgctgcaaaccgcacgcagctatggcagccgcctgatgggcaagatcaagggccaacgcgaactcaccgtcgatgacagcgtgctgcgcctgctcgccctgcgccaacgccaactgctcaaggccctgaacctgcgcgggcatgcggcgatgcacagcattaaggtcgatacgccccaggacaaaacctggcgcgaaggcaagctgccggacgccttgcacaaggcccgcgcctatccgcaatggtcgtccctcaacccccacgccaaactgagccaggccgaacgtcaggagcaggtcgaggcattgtcgttgcaactgaatgaaccggggctcatgccttgaatgctcagtaagcagcgtcaaacggtgtggtcttttgcttactgatcaatgtgcctgaatatccacaaccttggcatcgaagggctcaggtgtgtgccaattgaacttcaaataaagctcagccaattgctggaccaagtgcttatcaacttcatcaatgacgccatcgcagttgatgtcggcgtgaatgttccactcaagttcaccgttgttatcaaaatcataggcggcgctccaagacacctgagcgtccgaactcagcagccctgggcctttgtgtaagtgcaggcgcacggtgtcgggggtgccgtctttatagaagtcttcggaaaagatcttcatgtaaagccggctactggcgccgcgattcacccagttgatcttcaaataggcattggcaaattgatccagcaacgcttgatcaagactgctttcctgaccgtcattggtaacgtctcccctgctgtaatcgacctttgcgtctgaggtgaagtcataggctacggcctcattgagcaactcgtcctgattgcagggcgtaccttggtagaactgaagacgcaccgtattcgcccggccatctcccgtttgatcctgtgcaactaccttcaaatagcgcatctgcgttgctcccttggctaagaagcaagcaccttagtgcggcggctatcgaggctccaggcggcgtatctgcgatgtgtgtaaggcccgtctacgcggccagtagtcgggcggccatggctttgagcagttgcagatccaacaccggcacctgcgtttgcttggcctgctcgtcccagtggcgcatacgcaaactcacggcatatagcgagtcctgttcaaaagccctggcctcttcggcgctcatcacgccgccctgataacccagggtgcgacggctggcttggctcaagcgggcgaaatagtccggttggctgaaggtcaggtaacgcttggcctgcacgtggtattccaccaatttggccaagcgttcgctgaagcctgcgcggcgcaggtaatcggcgcccagccgctcgtggctgaccacaccataaccgcccatgttcgcgcagccctggccgcagaggtggccgatgtcgtggaaaaacgccgccagcaccacctcgtcgtcaaacccttcggccatggccaattgcgcggcctgggacatgtgctcgatttgcgacaccggctcgccgatgtagtcagccgtgccgtgctgctcgtacaagccaaacacctgggcaatcgcctgttccgggctcatcgcgtcgcgccccacagcgtgctgatattacgctcggccatcgccggccccacgctcatccctacgccggtgtgcatcaaggcagcgctgacgccgggtgccgcctgcacaaacgaaaacggcccaggcccgcgcgaaccgtagacaccctgccaacgctcgaccacctggaccttgcaacccagggtctgttgcgccagttcgatcagccagtcatccacctgctcggcgttgaagggcgacggatcgctgtcgtaatggtgggagtcaccgatgatcaactcaccatggggcgtagggctgatcaacaggtgaatgccgtgctcgtgcaggtacggcgtttcccgcaggatctgcgcctgcaccgcggccgcttccggcaggtcggcgaaggcgccgtagtgcacgcagctcaagccggtgagcaaggcatgttgcaggttcagattgagcaccggccgggcgcgcagcatttgcaggcgacaggtttgcgggttgagcccggcgatagcgtcggccagcagggtctgataatcgtggccggagcaaacgatgatctgctcgccgcgaaagcggcctgccgtgctgtgcaactggcccggttcaacctcgcgcaccagggtggagaagtgaaactccacgttcagcgcctggctcaggtaatggatcagcgccgggatggcctcgcgggaatacagttgctgatcgtccttgccatgcagtgcggcgcggtgatgacggaactggccagcgtacaggtcgttcatggcagcgccttgcagcagctcgacgttgtagccgtgctcccgcgctcgctcggcgcagaaggcttcgagcagatgctcttcggcttcggtgcgggcgaacaggtaggagccattgcgcttgagcgccaggcccgccgcctgcgcccactggccccagatttcgcggctttcccgcgccaggtccagcattggccctggtggttgaccggtgaccagtgcctggccgaagttgcgcactgaggcgcccaatggcgtggcgctgcgctcgaacaccttgaccttgaggccgcgcctggcggcggcataggcgtgggagaggccgagaatgccggcgccgacgactaacagatcactactcatactgtcctctggttcccgcgctccgcgtgggaattcatccggtgacgctccgcgtcacgacctttaaaagcggacgcggagcgtccagagcggcgttaccacgcggagcgtgggaacgatcggttactgtttttccgacttgccgtcataacgcttacgccattcggccaggatgctgtcacggtttttggaagcccagacaaagtcgttcttgatcaaccgttgctcatagtccgctggcaattcggtctgcggcttggcgatacccggttgggcgagcacggcgaagttgtccttgtacagatccatcgccgcggtgctggcggagaagtcagcgagttttttcgctgcgtcagcgtgggcagtgcctttgatcacggcggtggcctcgatgtcccagcccaggccttctttgggcaggataatgtccagcggcgcgccctggcgtttgagctgaaccgccgggtattcgaaggagataccgatcgggaactcaccggaggccgccagtttgcacggcttggagccggagtgaacgtactggccgatgttctgatgcaggtcgtccatgtactgccagccttgcttctcgccgaaggtctggagccaggcgctgacatccaggaagccggtgcctgaagacgccgggttaggcatcacgatcttgcccttatattcgggcttggtcaggtcctgccagcttattggtttggtgaggccctgtttctcggcttcgacagtgttgaagcagatggtggcagcccacacgtccatgccgacccaggccggaggattggcggcgtcgcggtagtttttgccgatcttgtccaagtccttgggcgcgtagttttccagcatgccttgctgatcgaggatcgccaggctggaggcggccaggccccacaccacgtcagcctgggggcggtctttctcggccagcagtttggcggtgatgatgccggtggagtcgcgcacccacttgatctcgacgtcggggttggcctgttcgaaagcttttttgtaggtcttcaattgctcggcttcaagggccgtgtacaccgtcaactcggtcttggcgaaagcattcaggctgaatgccgtgaggactgcagcgaccagcgccaggggcttgaacatggagcacctccttcagggatgttttattggccgggtgcgcgctggcgccaggcttgggagcggcgcagcgcgccacgtgaggcccacgccagcagcagcgagacgctggccgaggtgaacaggatcagggtcgacatggccgccgcgccgcctacattgccggcgtcgtccatgttcagcacggcgacggcggcgaggatggtgtcggggctgtagaggaagatcgcggcagacacggtggtcatcgccgacacaaacaggtagcgcaggatgtccagcagcgccggcagacagatcggcaccgtgacgcgcagataatggcggtacaacggtgccttgagggacaaggcggcggcttcgaactcggcgtccaactggcgcaaggcggtggtcgcggtcatctgcgcggtggtcaggtagtgggcaatggtgcacaccaccagcaacgccatgctgccgtacaacacatgcagcgggttgccgttgaggttgaagaagaacacgtagcccagccccaggaccaggcccggcacggccatcggcacgaagctgagcatgcgcagtgccaggttgaggttcttctgacccttggtcttttccatcaggtaggcaccggtgaaaatcagcacgctgccgatcaacgccgtgcacaacgccatggtgaggctgttgcgataggccagccagccgccgccagcggtgtcttcgaactggtagtggttgagcgacagcgacaggttgtacggccagaatttcaccagcgaggagtacaccgccatgccgaacaccaccagcaacgccgcgcaaatcagcagcacgatggccaggtagcacccgtcgcgcagccgtgatggcgctggctggaacacctgggcgcggccgctcatcgcgtcgccatgccgacggcgcaaccacgcatccacgccaaagctgaacagcgccggcagcagcaacaccatgccgatcaacgcgccgcgaccgaactgttgctggcccaccacggccttgtaggcctccagcgccagcacctggtaatcgccgcccaccaccaccggtaccccgaagtcggtaatggtcagggtgaacaccaggcagaatgcggcgaacaccgcctggcgcgtggccggccaggtaatgctgcgaaacgcccgggccgggctggcgcccatgctagaagcggcgtcgaacaaacgcgcatccgccagggacaacgccgacagcaaaatcatcaaggcatggggaaaggtgtagatcacctcaccgagcacaatgccccagaaaccgtagatattctccgagaacaaaccccgcagcaggccctggttgccgaacagataaaccagggcaatgcccggcagcatcgacggcgccatcaatggcagcaaggacaggccgcgccagatggacttgccggggatcagcgtgcgttgcagggcataggcaaacaagtaggccagcggcacgacgatggccgccacactgagggacactttcaggctattgcccagcaaccagtggaagttggcgctgctcagcagttcgcgcgcggccaccaggccaccgccctgcccggcttcgctgctgaagccgcgccagaagatcgccaacagcggcaacagcaccgccaccaccaacaggcccagccagagccatttgccgccgaccacaaagaggcggtcgccccactcggcgcgggacacctgacgcggtaccggcaatgtcatcacagcccccatctcaggcaaacacctgcaggctgcgcggcggcaacgccacccagatgtcctgggcgcccaggcgcggcatggcttccggcgtcagttcagccagcaacggatggcccggcaattgttccagctcaaagctcatgcggcagcggttgccgaggaaggtaatctcgcgaaccttggccgggaacaggttttcttcatgcaccggcgggttgacgcaaatggcttccgggcggcagaacaagcggccggactgggcgacacccgcgtcctcagccaggcgcatcttcaacccacccacctgggcatggctggcgctgttacggctgaacggcaaccagttgccctggccgacaaactccgccacgaacggcgtggccgggcggtcgtagatttcctggggcgtggcgtactgctcgaccttgccgttgttcatcacggcaatgcggtcggccatcaacatggcttcgtcctggttgtgggtcaccatcaaggtggtgatgcccaggcgccgctgcagttggcgcagttcagtgcacaggtgctcgcgcacccgggcatcgagggccgacatcggctcatccaacagcaataacgacggcgccggcgccagtgcgcgggccagggcgacgcgctgttgctggccgccggagagttggccggggtacttcttttcgctgcccaccaggccgaccagttcgagcatctgcgcgacacgcttgcgcacttcatcgcggccgctgccggtgaggccatagccgatgttcgcttcaacgctgaggttgggaaacaacgcgtaggactgaaacaggatgccgtagtcccgcgcctggggtggcagcaaggacacgtcgcgctcgcccaggtaaagctcaccgctgtcctggcgctccaggccggcgatgcagcgcagcagtgtggtcttgccgcaaccggaagggcccagcaggcacaccagctcgccggcggcgacgtccagggagacgttgtccagcgcggtgaatgcgccaaagcgtttctggattgcgcgcactttcatcggtgcgccgggttgggtcagggctgtgtgcatggtggcacctcatcgaacggatgaaggccatgctagggaggcaatgcgtagctggtgtggcagaaaggcaaaaggaggtgatagtggtattggtggatttgtgtaggactcatgatcgttcccacgctctgcgtgggaatgtctctagtgacgctccgcgtcacggacgcggagcgtcctcggcggcggtcccacgcggagcgtgggaacgatcagaggggtgacatttcctgagccaaaccaagaaacgccgccggcaaccgcgcccctttgcgctccttgaggcaatacaggtactccggaatctgcggtgcattctcgatggtcagcacacgcaattgcgggtcatggggcacttcctggcgggcaatgatgctgatgccgatattgcgcagtaccgcctcgcgaatcgactcacggctgccaatctccagcaacggcccgtaccccacgccggcgttcttcaacatctcttccgtcagccggcgggtggtggagcccgcttcacgcatcagcaaggtgtgcccgataagcgcgctcaacggtacatgatcaagcttggccaacgggtgattgcggtgcaccgccagcaccagcgggtcggtgcccagcacgcggcggatcagccgggcgtcttccagcaattgcgatgaggccgcgacatcgacgcggtaatcgtccagcgcttcaagcacctgctgggagttgccaatttccaccgacacttccacctggggcaggcgctcgcgaaaggctttgaccagatcgaggatgtaatacggcgccgtcgcggcaatcctcagcgcgccctggacctggccgttgttgcgcaggaaaaactcgatatccgcttcctgctgcaacagcgccttgaccatcggcaatagccgcgcgccttcgtcgctgacggtgaggcggcggccgccacggtagaacaactcgacgccgtagtggctttccaggttgcgaatctgggtggtcaccgtgggctggctcaagccgagtttcttcgccgcctgggtaatgctgcccaggcgggcgaccatgaaaaacgcctttaactcagcactcagcacaccaccctctcatccgctatttgcgcaccaggcgcaggccattgaacaccaccagcaggctcacgcccatgtcggcgaagaccgccatccacatggtcgccatgcccatgaacgtgacggccaggaagatcgccttgatcaccagcgccagggcgatgttctgcttgaggatactcgacgtttgccgcgacaaccgaatgaaagccggaatcttgcgcaaatcatcgtccatcagcgccacatcggcggtctcgatcgccgtgtcggtgcccgccgcggccatggcaaagccgatctcggcacgggccagggccggggcgtcgttgataccgtcaccgaccatgcccacccgatggccctggccgtagagggtttcgatggcttgcagtttgtcggtgggcaacaggtcgccctgggcctggtcgatgccgacctgggccgcaatggcctgggcggtgtgggtgttgtcgccggtgagcatcagggtcttgatgcccaggtcgtgtaattgctggatggcttcgcggctgctttccttgaccgtgtcggccacggcaaacagcgccagcgggccggacttgtccagcagcaacaccacggacttgccttgtttttccagggcgaagagtttttcttccagggcctcggaacacaggccgaggtcttccaccaggcggtggttacccaggtgataggtctggccgttgatatcaccccgcacaccacgcccggccaaggcttcgaagttatccacagcgtgagtcgacaggtttttatccacagccgcgttggcaatcgccagggacaccgggtggtcagaacgcgatgccaaactcgcggccagggccggcgcgctgtcttcgatattcgggaacagcggcaggtaatcggtttgcaccggtttgccatgggtgatggtgccggtcttgtcgagggccaggtagtcaagcttgtagccgccctccaggtacacgccgcctttgatcaggatgcctttgcgcgccgcagctgccaggccgctgacaatggtcaccggggtggagatcaccaaggcacacgggcaggccaccaccagcagcacgagggcgcggtagatccagtcaaaccacacacccgccatgaacagcggcggaatcaccgccacaccgagggcaaacaggaagacggccggggtgtagaccttggagaaactgtcgacaaagcgctgggtcggtgcgcgtgcgccttgagcctgttccaccgcgtggatgatccgcgccagcgtggagttgttcgccgctgcggtaaccttgtactccagggagccggcctggttgatggtgccggcaaagactttatcgcccacggttttctcaatcggcaggctttccccggtgatcggcgcctggtcgatggtggactgaccggccgtgacctcaccgtcgaggccgatgcgctcaccgggtcttactcggacaatcgcgccaagatcgatgcttttgacctctttttccagccaagaaccgtcggcctggcgcaccgtggcctgttccggggtcatctgcatcaggccgctgatggcgttgcgcgcccggtccagggacttggcctcaatcaactcggccacggtgaacaggaacatcaccatcgccgcttccggccactggccaatcaggatcgcgcccgtcaccgcgatgctcatcaaggcattgatattgaggttgaagttcttcagggcaatccagcccttcttgtaggtggtaaggccgccgctgaggatcgacaccaacgccaccagcgcgattacccaggtgggcgccacgccggtgaagtgcaacacctcggcccccagggcacccacgcccgacaccgccaacggccaccaatgtttcttggcgggcggcgcggcggcggggctgccttcttcgatagggtcggcctgcatgccgatggacttgattgcctcgatgatcggcgccgtgttcggcaggtcatgggtgacgccgaggatgcggttgatcaggttgaattccagttgctgcacgccagcgagcttgcccagcttgttctggatcagcgtctgctcggtagggcagtccatggcttcgatgcggaaggtgctcaggcgcgagccggcggtgggcgcctcactcagggtcacgatggcaggcccggcagcgccggagcagcaggagccggaatggccatggttatccacaggcgtgagtttggcgggcccatggtcatgtttatgatcatggccgtgatcgtgatcgtggtcatgcgggtggtcatgcgggtggtcatgatcgtgatcatgcttgtggtcgtgcttgtggtcgtgcttgtgcggggtatgaatggagtggctcatcaggtcgcgtccgtaaaggtgcctgttgccaagtaaagaccctgtagccactatagggtcaagcacccatttggagattgctgcgatgaagatcggcgaactggccaaactcaccgattgcccggtggaaaccatccgttattacgagaaggaaaacctgctgccgcccccggcccgcaccgatggcaactaccgcgtgtacacccaggcgcacaccgagcggctgacctttatccgcaactgccgcagcctggacatgaccctcgaagaaatccgcagcctgctggggctacgcgacagcccccaggaccagtgcgaaagcgtgaatgcgttgatcgacgagcatatccatcatgtgaaagcgcggatcgacggattgttggccttgcaggaacaactgctggacctgcgccaacgttgcggcggtgggaaccagtgcgggatcttgcagcagttggaggtcagcggagggattgcggccagcgaggccgagccttcgcatgtgggcagaagccacggccactaacccaagtgaacaccgaacccatgtgggagctggcttgcctgcgatagcggtggaccagcaacattgatgtcgcctgacactctgccatcgcaggcaagccagctcccacagtttttcaccgaataaggctttagatagccacgtcagccttgatgctcgggtcggcgtcgtagcccacgatttcgaagtcttcgaacttatagtcgtagatcgacgcaggcttacgcttgatcaccagttccggcagttttttcggcgtacgcgccaactgggtctggatctgctccatgtggttgctgtaggcgtgggtgtcgccggtagtgacgatgatctcgtgggggatcaggtcgcactgctgggccagcatgtgggtcagcaacgccagcgcggcagtgttgtacggcaggcccaggaacacgtcggagctgcggatatacagctgcatcgacagatggccgtcatgcacgaacgcctggtacagcaaatggcatggcggcagggcttgcttgccgttacgcgcgttctcctgcgggctctgggtttcgtccggcaggtattcgacgttccagccgtggaacaggatgcgacggctgttggggttggtcttgagcgtgtgcaccatgtagtcgatctggttgatcgtgccgccgtccttggtcggccaggcggtccactgctcgccgtacaccgggcccaggtcgccgtcttcggtggcccattcgtcccagatcttcacgccattttcgttgagccacttgatgttggtgttgccgctcaacatccagatcagttcgttggcgatgcttttgaagtgcagcttcttggtggtcagcagcgggaagccgtcggccaggttatgccgatactgacgcgcaaacacagccttggtgccggtgcccgtgcggtcgcccttggtcaggccattggtcacgacatcctgcagcagttcgagatattgcttcatgtttttacccgtatcgttgaagccaagacctcctggtcttggcattcgaatttaaagcgcggcgttcttcagcggctgcgggcgattgtacgcccaccacagcatgcccaggcccgccaggatcatcggcaggctaagcacctgacccatggtcagccagccccatgccaggtagcccaactgcgcatccggtacccgtacgaattcgacgataaagcggaaaatcccgtagaacagcgcgaacatgcccgacacggccatggttgggcgtggcttgcgcgagaagatatacagaataaggaacagcgccacaccttccaacgcaaactggtacagctgcgacgggtggcgcggcagttgcgccgggtcgctgaacgccgggaacaccatcgcccacggcacgtcggtcggcttgccccacagctcggcgttgataaagttaccaatgcgcccggcgcccaggccaatcggcacgaagggggcgacgaagtccatcagctggaagaacgacttgccattgcgccggccaaaccaccaggcggcgatcatcacgccgataaacccgccgtggaacgccatgccgcccttccacacttcgaagatcagggtcgggttggcgagatacgcagacagatcgtagaacagcacataccccaggcgcccgccgacgatcacgcccatcgacatccagaacaccatgtcggagagcttttccttggtccaggtcgggtcgaaacggttcaggcgccgggaagccagcagccaggcgccgccgatgccgatcaggtacatcaacccgtaccaatggattttcagcggaccgatggccagggccaccgggtcgatctgcgggtaaggcagcattgcgactcctcgttaaaacatttagtcatgacgcaccggaccatgccgatgtgcgattaagcctgcgttacagcggcgagatcaaattaagaagttcacatacacgccaaatagcccggcatgttaacggatcagaggtgcacggcccaacttcgagacgatggaacaccggcgcgtctgtgggtagagtggcaaaaacacaaaaggggtcacccgatgtgcctgattgttttcgcctggcgaccgggccatgcccagccactgatcgtcgcggccaaccgcgatgagttctacgcccgccccagcctgccgctggcccagtgggcggatgcgccccaggtctatgccggtcgcgatcaggaggccgggggcacctggctgggggtgaacgcggatgggcgctttgccgccttgaccaacatccgcgacccgcaccagccaccggcacgcaagtctcgtggcgagctggtcgcgcggtttctcattggttcgctgccgattgatgattatttggccgatgtgaatggccgctcgattgaatatgccgggtttaacctgctggtgggcacgcgggatgagctgtggcactacaacgccaatgacaccgagccgacgttgctgaaggctggggtgtacgggttatccaatgcnnnnnnnnnnnnnnnnnnnnnnnnnnnnnnnnnnnnnnnncgcaggcaagccagctcccacaggggaatgcattccacaggtgggagctggcttgcctgcgatgaaggcgcctcggtctttgatcgttcccacgctctgcgtgggaacgcctcttgtgacgctctgcgtcacgctctaaaagccgacgcggagcgtccagggctgcattcccacgcagagcgcgggaacgatctgctagaagctcgctcctacagggttttggccgaggccgggttgatcatccgggtcaaccccaggttcttcaacgccagttgcagcgagctgtggataacttgcgggttgtcgatggtcatcaactcggcgagcaaatccttggccctgctcaactccacctggcgcagcatccacttcactttcggcaagttggtggcgttcatcgacaggctgtcaaaacccatcgccatcaacagcaccgccgccgcggggtcgccggccatttcgccgcagatactcaccggtttgccttcggcatgggcgtcgcgcaccacgtgttgcagcgcttgcagcaccgctgggtgcaggtagtcgtagaggtcggccacccgtgggttgttacggtccacggccagcaggtactgggtcaggtcgttggagcccaccgacaggaagtccacctgccgcgccagttccttggcctggtacaccgccgccgggatttcgatcatcaccccaatcggcggcatcggcacatcggcgccttcgtcgcgcacttcgccccaggcacggtggatcaggtgcagggcttcttccagttcatgggtgccggagatcatcggcagcaggatgcgcaggttgttcaagccctcgctggccttgagcatggcgcgggtctggacgaggaagatttcgggatggtcgagggtaacgcggatgccacgccagccaaggaaggggttgtcttccttgatcgggaaataggacagtgacttgtcgccgccaatatccaggctgcgcatcgtcaccggtaacgggtggaaggcttgcagttgctcgcgataaatcgccagctgctccttctcgctcgggaaacgctggttgatcatgaacggcacttcggtgcggtacagccccaccccttcggcaccgcgttgctgcgcacgggctacatccgccagcaggcccgtgttcaccagcagcggtacgcggtggccgtcgggggtgacacacggcagctcgcgtagcgaatccaggccctgggccagttgcttctcttcttccaccacctcggcgtattgcttgcgcagcacgtcgctggggttggtgaacacctcgccgcgatgcccgtcgacgatcatgtcgatgccatcgaccttggaatacggcaggtctaccaggcccatcaccgtcgggatacccatggcccgggccaggatcgccacgtgggagttacccgaacccaataccgacaccaggcccaccagcttgccttcaggcacttcgccaagctgggtggcggtcaattcttcactgactaaaatggtgttatcggggaagaccatgttggtgctgcggtcttcctgcaagtacgccaacagacggcgacccaggtcgcgcacatccgacgcccgctcgcgcaggtaggcgtcgtccatcatttcgaaacggttgacgtgatcggtgaccacctggcgcaacgcgccctgggcccactggccggtcttgatcacggtcttgacttcgttacccagggacgcgtcgtcgagcatcatctggtacacgtcgaacagcgcacgctcttcggggcgcagctgggtcgccagcttggtcgacaggttgcgcatgtcggcgcgcacgccttcgagggcggtcttgaacagtttgatctcggcgtcgatgtcactgacgctcttgtccggcaccacatcgaggtcggcgggcggcagcatgaccaccgcggtacccaccgcagcgcctggcgaacccggtacaccgacgaacttggcttcctggatacccttgccctggcgccccaggccgcgaatcgagccggtcgcttcggcgtgggcaataaccccggccagttgcgcgctcatggtcaccaggaaggcttcttcgccttcgtcgaactggcgacgctctttttgctggatgaccaacacgccgacaacgcggcggtggtgaatgatcggtgcgccaaggaacgaggcgtagcgctcttcgccggtttcggcaaagtagcgataacgcgggtgatcggccgcgttttcgaggttcaggggttcttcacgcgtccccaccaggcccaccagaccttcattgggcgccatgctgaccttgccgatggagcgcttgttcaagccctccgtggccatcagcacaaaacggttggtctcggggtccagcaggtaaaccgagcagacctggctgcccatggcttccttgacgcgcaacacaataatccccaacgccgccttgagatccttggcggagttaacttcctggacgatcttgcgcagcgtattgagcatggctcggggtcgaactccgtcgtcagtcgcgcgctaaaaggcgcggggcaagctctttgagagcgcgacgataaacctcgcgcttgaatgtcaccacctggcccaacggataccaatagctgacccagcgccagccatcgaactccggtttaccggtcaaatccatccgcacccgctgctcgttggagatcaggcgcaaaagaaaccatttctgcttctggccgatgcacagcggttggctgtgggtacgcaccaggcgttgcggcaaacgatagcgcaaccagccacgggtacaggccagaatttgcacatcttcgcgctcaaggccgacttcttcgttcaactcacggtacaaggcgtcttcaggggtttcgtcggggttgattccaccttgaggaaactgccaggcatcttggttgattcggcgagcccatagcacctgtccggcatcattcgtcagaataatgccgacattaggacggaaaccatcggggtcgatcacggcaacaacctcgcaaacgcatgtcgccgcattgttccacaaaggttgttccagcggcaacgaggcttcttaccttatgtgcactcttgtgaaaagaccgtattctggacgcctttttacagacttttcagcgagtaactgcaatgcgcctggccttattcgacttggacaatacccttctgggcggtgacagcgatcacgcctggggcgattacctgtgtgaacgcggttttctcgacccggtggcctacaaggcccgcaacgatgagttctaccaggactacctggccggcacgctggataacgccgcctacttgaacttctgcctggaaatcctcggccgcaccgagatggcccagctggacgagtggcacaacgactacatgcgcgactgcatcgagcccatcctgctccccaaggccgtcgagctgctggccaagcaccgcgccgccggtgacaagctggtgatcatcaccgccaccaaccgcttcgtcaccgcgccgattgccgcacgcctgggcgtcgagaccttgatcgccaccgagtgcgaaatggtggacggccgctataccgggcgcagcactgatgtgccgtgctttcgtgagggcaaggtgacacgtttgaaccgttggctggaagaaaccgggcatagcctggaaggcagctacttctacagcgattcgatgaatgatttgccgttgctggagcaggtgactcacccggtggcagtggatccggatccgaatttgcgcgctgaggctgaaaagcgtggctggccggtgattacactgcgcagctgatgacgctatcgcaggcaagccagctcccacatttggaatgcattcccctgtgggagctggcttgcctgcgatgaacgcgacgcggtctaacgctttaaaccggcttggcgcccatcagccctgcaattgccacaaaccccaccaggctgaccaccgccagcaccagggtgaaattcaggctcccgccctcgcccttgcgcagccgattgagccgcgccaccagccagaaccaggccagcgccgccacggtgtagaggatgctggagcccaagatccaggtttgccccaatggccagccgagcaggtgcaccagccaccagccggtgaacggcatgctcaccaggcatatccccatcagcagccatataaatgcccaggggcgttgcacggtcgcagacgggccggcgctgcgtttacgccacgccaataccgccaggcccaggccgctgagcagcagcaatacggtggcggtgatgtggatcaccttgagggtggtcagcgtttccatggtctctattccttttaggccgctcagtcagcgtagtcgctcaaccgaggaacagctggtaagccgggttttcgctttcatcccagtacgggtaaccgatttgcgccaacgcggcaggcaccaggtggcgctcgtccgccggcacttgcaagcccgccaccactcggccgtcagccgcaccgtggttgcggtagtggaacatcgagatgttccagcgcccgccgagcttgtgcaggaagttgaacaacgcccccggtcgctccggaaattcgaagcgaaacaccaattcgtcgctgactttggccgcatgcccaccgaccatatggcgaatgtgcaacttggccagttcgttctcggtgaggtccagcaccggaaaaccctggctggtcaggctggccaccaacgcgctgcgtgggtcgttctccgggtgggtctgcacgccgacgaagatgtgcgcttcgctgccggagtggtagcggtaattgaattcggtgatctggcgcttgcccaccgcttcgcagaaggccttgaagctgcccggccgctcggggatggtcacggcgatgatggcctcacgaccttcacccaactcggcgcgctcggccacatggcgcaaacggtcgaagttgacgttggcgcccgagtcgatggcgacaaagctctggccgctgacgccacgggtctcgacgtactttttgatcccggccacacccagcgcaccggccggttcggtgatggagcgggtgtcatcgtagatgtccttgatcgccgcacagatttcatcggtgctgacggtgatcacttcgtccacatagtctttgcagatgtcgaaggtatgctggccgatctgcgccaccgccacgccatcggcgaagattcccacagtcggcaaaaccacgcgctcgcccgccgccatggcggcttgcaggcagttggagtcgtccggctccacgccgatgatcttgatttccgggcgcaggtatttcacatacgccgcaatcccggcgatcaggccgccgccgcccaccggtacgaaaatcgcgtccagcggccctgggtgctggcgcaggatctccatcgccacggtgccctgcccggcaatggtatgcggatcatcgtaggggtggatgtacacgtagcctttttcgtcgaccagcttgagcgagtaggccagggcttccgggaaggaatcaccgtgcaacaccactttgccaccacgggaacgcacgccttcgaccttgatctccggggtggttttgggcatcacgatggtggctttcacccccagcaccttggccgccagggccaggccctgggcatggttgccggccgacgcggtgacgacgccgcgtgcacgttcttcggcactgagctgggtcagcttgttgtaggcgccgcgaatcttgaacgagaacaccggctgcaagtcttcgcgcttgagccaaattttgttacccagccgctcggagagctggcgggcagtctgcaagggggtttccacggcgatgtcgtaaacgcgcgaggtgaggatttttttgacgtagtgttcaagcatcggcaggcatctacttcacgggttgggcagggccaaggagtctaacccagcgtttggccgggcgaccacacgaatcccgaggttttgttgggttatactcgccgccctcgttaattccccgcccgttccggagcccgcatgacccaggatcaactcaaacaggcagtggcccaggccgctgtcgatttaatccttcctaaactcgacgacaagagcatcgtcggtgtcggcaccggttccaccgccaactgctttatcgacgcactggcccagcacaagggcgcgttcgacggcgccgtcgccagttccgaagccaccgctgcccgcctcaagggccatggcattccggtgtacgaactcaacaccgtgagcgacctggagttctacgtcgacggcgccgatgaaagcgacgaacacctgaacctgatcaaaggcggcggcgcggccctcacccgcgagaagattgtcgcggccgtggccaagaccttcatttgcatcgccgacgcgagcaagctggtccccgtgctgggcacgttcccactgccggtggaagtcatccccatggcccgcagccacgtggcccgcgagctggtgaaactgggcggcgacccggtgtaccgcgaaggcgtgttgaccgataacggcaacatcatcctcgacgtgttcaatatgcagatcaccaacccggtggaactggagacgcagatcaacgccattgtgggcgtggtcaccaacggcctgttcgccgcgcgcccggcggatgtattgctgctgggtaccccggaaggcgtgaaaaccctcaaagcctgaccctgtgggagccgggcttgcccgcgatgcagacgactcggtgtatcaatggataccgaggcgatgccatcgcaggcaagccagctcccacatgtgttagcgctcggctctaaagcgatgtaacaaaaacgctacttttcgcagcactcctcgccaaaaccgtgcgctctgtcacggcatcccctgccccgcctggtatccaatccgttacaaattacagccacgcgacccacgcgtttaacaatgcgccaatttgcagccgcccagggaatgaggcgcgcattgtgcaaagggtctgggcttgaacgtccccctcacctcaaggaagaccttgtgataaagcctctagccctcgccatcagcgttgccggtgccctgttgcccacccatagccaggcctacgattacggccagcacgccaacaccaccctggaaaagctgatcaacgattaccctggccgttatcgcggcacggccaattttgccggggcagccgactggatgcagagccagatgggcacggcctataacatcagccgccaggatttcacctggaacaacggcagccgggcttcgcaaaacgtggtggcctctgccgctggcaccaaggcccagtacgtggtgattggcgcgcatttcgatacctacttcggccgcccgaccctacaaggcctggatgacaacggttccggcgccagcgtgttgactgaggtggcgaagaacctcggcggcctgtcactggaaaatggcctgcaaatcgttggcttcggcgccgaagaagaaggcctgcgtggctcgcgggcctttgtcgactcactcagcgccagccagcgcgccaacatgctcgcgatgatcaacctcgacagcctgatcaccggtgacatgatgtatgcccacgccggccagaacagcaccgctaacccggcgttggcctccttgcgtgagcacaccttccagatcgccagggaactgaacatccccttgttcagcaaccccggcctggacccgcagtacccaaagggcaccggctgctgcagcgatggtgaagcgttcgaaccgctgaatatcccgatcctttatatagaggccaccaactgggaactgggcgacctggacggttacacccagaccgacaacccgaaaatccccggcggctcaacctggcacgacccgaacgaagacaacaaagccgtgctgaccgatgcattcggccaggcgcgcatcgaccagcgcctgcgtgactattcacgcctgctcagccgcctggtgctggaactgaccaacaccgacctgatggcctcgaccgcttccggcggcgccgttgcgcgcaatatgcaagacaacctgcagcgccagcatcaggccctggtacgcctgcatgatcgccgctggctgaccctgcaagcggccagccgcgaggtgggcagctttgatggcgagatcggcgtggatggcgaatacaacccggacagcggctttgacactgcccccaaccccgaagcccgacgcctgggcctgcatgccctcggcgactaccaactgacttcaagcctgaatatcggcgccagcctcagctacctcaatgggcgcgacaaactggagcatcgcggcaagctcgacagcgacacctggcaggcagccgtctatgcactgctcaacgatggtgggccaagctggctggccggtgacctgagcgtgggccacacgcgcttcgattccaagcgcaacctggtcatccaggccaatggcgggccgatcctgctcaaccagcaactgacgggcgataccgatgccctggcgttgggcgcacgggtgctgggtggctatgactttgactttggcgcgatcaagagcgggccgttcgccggcctggactacagccattaccgcatcgacaagttccacgaaaagcagaacctgcgcacggccctagagtacgaagagcagtctttcgactccctggaagccagcctcggctggcgcgtgcgcggcgctgttgccctgccctatggcctgaacctgatgccctacggcgacatcgcctgggtcaaggaattggccgacggccgcctggacgacctgcaactcaccgcacgcgccgatggccaggcccgcaccgccaggctgggctcagtggataagagcttcgctcgcgcacaactgggcagccaactggcgatcaccccacagctgggcgtgttcgccgaggtcaacggccgcctcgggcatgccgaaggcagccagaccggttattcgctgggtgtgcagtggatgttctgatcagggtttcttgaacacgtaaaacaggttgggctcgctgaccatgtacagcgtgccgtcgtcatccatggcgatcccttcggcctggggcacgcgcttgctcaggccatggcgccctttaagcaacgacagactgcttagagggcgaccatcaatatccagctccaagaccaggaacgactcatccgacagcgccaacagatggccgctgcgctcgtcgtattgcaggctcgacaggtcgcgcacaaacagcccggcatcgcgcttggggttgttgatcacatgcaccgaataggttttttccggcttgaaatggggaaacccgtgcacctcgtagatcagcatggggtcgcgttccttggccacgaacaagcgcttgcccaccgaatcgtaggccaacccttcaaagcccttgttgccgccgacgtgcacgcccagagtcatttgctccgcatcggcagcgtcgaggaacttggtgtcttcgtccacatgcactttgatcaagcgctgctggcgctcatcgctgatgacgtagatgttgtcgctgataaattccaccgcttcggcatcgccaaagcccaccagcggaatgcgccgcaggatcttgccctccagcgacaactcgaccagttcggcgtttttattggtgacggtaaacaggcttttgcgcacggggtcgtaggtcagggccgagacatcgtcgtcgagcccttcgatcacctggccttcgagggtgacacggtagtccgccaggccaatggcgcgctcatccgcaggctggtaccacacccgccagttgaaccaggcgcgttcgaacagacggaactgctgtgccaccagcccggcagcgaccaaggcgagcaatagcaagataaaaacagcaggtttagggcgggcaagtcgacgcatcggggcgggctcagagaaaaaactggcgaatagatatcaaggtcacctgaatttaaacttaaacgcaccggactgtctggcgaatgccgtttataaagaaaagtctgacgtaattcgtcagttatttctgcttttcaaagcgatagaacaggtttggctcactgaccatgtacaggttgccgctctcgtccatggtcacgccttcggcacgggggatcgtgtctttcaggccattgaagccgccaagcaaggtcatgaagctgacttgctcgcccgtttcatccagttccagcagcaggtgggaatcggccgacagcaccagcaaatgcccggtacgtgggtcgatggataaagccgagaggttacgcacatccagttcggtgctggccagtttttgcttgtcgccggtcagcgtattgccatcgcttttccaggtgaacaaggccggcgggcgctcttcgcccagcaccagttgctggttacgcttgtcccaggtgacggcttcaaaggctttgttctgctctttggacaggcccaggtcatgactggggaaatcggccttgttcagcgcggtggtgctggcgtccaccttgaccacggtgaggctgtgatcgcgctcatcgaccaccgccatcaagccgttttccatcaccgccacaccttccggattgttccagccgttgaggggcattttgcgcaacacatcgccttgcaggctcagctcaaccagaaaggggttcttgcccatcaccgaaaacagggttttggtctgcgggttgtaagacaggtctgatgcctcgtccttctccataccgggcagcaacttggcgtcgatcaccgcgtgatagtccggtagccacacactctcccggcgttcggccgaactctcgaaacgctccagcacccacagcagaccgcgatcgtcccagtgcatggcccaggcgatgccatacaaaatggcaccggccaagaacacccaggaataccagcgcatggacaagcgagagcggagcgaggttttcgaagtgggcagaggcacgaccattgagcgcttttccggaaagtgagctgtaggggatagcacaggattcaaggacccgcgcgcaagagcagggaattatccggatagtgtgtgaaaaaaatgcaaaacgccggatcttgcagatgtacacaaacaactgtgggagcgggcttgcccgcgatggcggtgtgacagtcactgaacagttgactgaacgccctcaatcgcgggcaagcccgctcccacagtttgatcgcagtgtgccggctacttagcgcacaacgctttcgaaacggttcacacctgccagctccaacaccacttcatcccccacattcaacgggccaacgcccgccggggtgccggtcaggatcacgtcgcccgcttgcagggagaagcaacctgccatgtactgaatcatcggcacaatcggattgagcatctgagcgctgttgccgtcctggcgcacttcgccgttgatgctcaggcgaatgccgatatcggccatgtccgcaaaggtactgctgaccacgaagggcgcaatcaccgccgcgccatcgaacgacttggcgatttcccacggcaggcccttggctttgagctcggcctgtttgtcgcgcagggtcaggtccagggccggggcgaagccggagatggcgtcaagcacttcttcccggctcggcttggcggacaaaggcttgccgatcaacacggcgatttccgcttcgtagtgcaccgaaccacgttcggtcggtatggcaaaaccgccttccaacggcaccacgcagctacccggcttgatgaacagcagcggctcggtgggcaccgggttgtccagttccttggcgtgttcggcgtagttacgcccgatgcacaccactttacccaccgggaagtggatgttggtgccgtcgacatacttgtgctggtagctcatggaacgactccttcaggtgcgattaaacagcgaagatcttgccggggttcatgatcccgttagggtcaaacaccgctttaacggccttcatgtattcgatttcaaccggtgaacggctgtaggtcaggtaatcgcgcttggtcatgcccaccccgtgctcggcggagatcgagccgttgtacttggcgacggtctcgaacacccacttattcacggtggcgcacttggcgaagaactcatccttgctcaggttttccggcttgaggatgttcaggtgcaggttgccgtcaccgatatggccaaaccagacgatttcgaagtccgggtagtgttcaccgacgatcgcgtcaatttcgctcaggaacgtcggcactttcgagacagtcaccgagatgtcgttcttgtacggcgtccagtgggaaatggtttcggagatgtactcgcgcagtttccacaggttgtgcagctgggtttcgctctggctcatcacgccatccagcacccagccttgctccacgcaatgctcgaaggtttccagggcgtggttggcgacttcttcggtggtggcttcgaattccagcagagcgtagaacgggcactcggtttcgaacggcgccggcacatcgccacggccaaggactttggccagggccttgtcggagaagaattcgaaggcggtcaggtccagcttgctctggaaggcatgcagcaccggcatgatcgagtcgaaatcagtcgtaccgagcaccatcgccgtgaggttcttcggcgcacggtccaggcgcatggtggcttcgaccacaaagcccagggtgccctcggcaccgataaacagctggcgcatgtcgtagccggtggcgttcttgatcaggtcgcggttcagctccagcgcatcgcctttgccagtgacgaccttcatgccggccacccagttgcgggtcataccatagcgaattactttgatcccgccggcattggtgccgatattgccgccaatctggctggaaccggacgaggcgaagtccaccgggtaatacaggccgttttcttcagcgacgttctgcaactgcttggtgaccacacccggctggcacacggcggtgcggtcggtgaggttcacgtcgaggatctggttcatatagtcgaacgacaccaccacttcgccattggcggccacggcagccgccgacagcccggtgcgcccacccgatggcaccagcgccaccttgtgttcattggcccagcgtacgatggcctgcacctgctcggtggtcttggggaacacgatggcggtgggtgcgggggcgaagtgcttggtccaatccttgccgtaagcctccagggagtcggcgtcggtcagcactttgccgggctcaaccagggtctttagctcatcaatcagggcaggatgggtcatcgacagaactctcgaacaattcatggtcatcctgagaacgcttcacgtcgcaggaataggtgtttagcggggtgcgtatgctagcataccgcccccgcaggacagacccaaagggcgtttctgcggtgacggctttcctgccgtccgggtcagcttgcgctgctcgactccctgccaattttctccgggatacaggtttacgcagatgagcaagacttctctcgataagagcaagatcaagttccttcttctggaaggcgtccacccatcggctgtcgacgttctgaaagccgccgggtacaccagcattgagtacatcaccagttctctgccggaagcccagctcaaggaaaagatcgccgacgcgcactttatcggcattcgctcccgcactcagctgaccgaagagatcttcgaccacgccaagaaactcgtggctgtcggctgtttctgcatcggcaccaaccaggtcgacctcaatgcagcgcgcgagcgcggcatcgcggtgttcaacgcaccgtactccaacacccgttccgttgcggagctggtgctggccgaggccatcctgctgctgcgcggtatccctgagaagaacgcttcctgccaccgtggcggctggatcaagagcgcagccaactccttcgaaatccgcggcaagaagctgggtatcgttggctacggctcgatcggcacgcaactgtcggtattggctgaaggcctgggcatgcaggtgttcttctacgacaccctgaccaagctgccattgggcaacgccacccaagtggccagcctgaccgagctgctgggcatgtccgacatcgtcaccctgcacgtgccggaaacggccgagactcagtggatgatcggcgagaaggaaatccgcgcgatcaagaaaggcgggatcctgatcaacgccgctcgcggtaccgtggtcgagctggacgccctggctgacgcgatcaaggacaagcacctgatcggcgctgccatcgacgtgttcccggtggagccacgctccaacgacgacatcttcgaaagcccgctgcgtggcctggacaacgtgatcctgaccccgcacatcggcggctccaccgctgaagcccaagccaacatcggcctggaagtctcggaaaagctggtcaagtacagcgacaacggtacttcggtatcgtcggtcaacttcccggaagtggccctgccggctcacccgggcaagcaccgcctgctgcacatccaccagaacatccctggcgtgatgatggagatcaacaaggtcttcgcggaaaacggcatcaacatctccggtcagttcctgcagactaacgagaaggtcggctacgtggtgatcgacgtcgacgccgagtactcggacctggcgcaagagaagctgcagcacatcaacggcactattcgtagccgcgtgttgttctagtaggagcgagcttgctcgctcctaccaataaaaaacgggagccccgcaaagggctcccgtttttttatttgacgttaacagtgatcactttcgatgcaacagtgggttcgaactggcgatgcacgttgtcgccggccaccagttgcagggtgtgcttgcctggcgtcagggtcagctcggtttcggtttgcgccttgccgaagtgaatcgaggtaggcgtggccgggatcgcctcgttagcgttgagcgcccccacttcctggtctaccagcaggtggtggtgaccggcgttaggcacttgcttgtcgatcggctccaggtccagcttcttgacgccgaatttgacggtgaaggttttatcaacggtggcgccatctttcggcgagacgataaacacttcggcgccttcaggtgcaggtgtacgcggaaggtctgcggcgctggccaacatcgaggtacccagcaaaaggctggcaatcgttgcacgggacaaaagggctttcattcgcttctccagtttttctgtgaaatctgtagggttatgacaacttcgcgataaattgcggtccaaggcacccgacaccatagcaaaacgatgctcaacggcgcctcgcctgtacgaattctttaggagtgaccatgcgcttttcgcctggcctgttgctgctgcttgctcttctgagccccttggctcatgccgaactgattgacgacgtcaacgatcgcggtgaactgcgcatcgccctggaagccaacaccccgccgtacaatttcaaagagggcgacaaactcgcaggctttgaagtggagctgggtgaactgctggccaaggagatggaggtgcgctcctcgtttattaccaccgataacgcggacctgctgtccggtgtggaaaccggcaagtacgacgtggccattaaccatatgtctatgactgccgagcttgaggatcgtttcgatttcagtgagccttaccaccagaagccggcattggcgatcccgttccagaagggcaacccggcgttcaagaccagtttgaacggggcgttgaagcgggttaaggacgatggccggttgaaggcgctggcgcagaaatggctcaaggtgcaataaaatgtgggagctggcttgcctgcgatagcggtctgtcagttacacataaggtgctgatacaccgctatcgcaggcaagccagctcccacacttgatctgtttaaacttcttaaagctgcgtgagggcaatcgccgcctgtggcaactccaactcactgaacacctgcacaccatggcgcttgagcagcgccgccgtgacgccttcgccactgaccttcaccccactgaaggtgccgtcataggtcaacaggttgccgcaggatgggctgttggccttgagaatggcgatgcggatgtgatggcgttgcaccagcgccaaggcctggcgggcaccgtcgagaaaggcgctggtgaagtcttcgccctcggccgtcagcacctgggcgcggccttcccacacgtcgatgccctgcccgcctgggatttcggccgatgaccgcggtgtgggcaagccgcccgccacttccgggcagatggtaaccacgcgaccttcagcttgccacgctgccagttggtcgaacgggccgctggccccgccgtcatagcgcactttgtgcccgagcaggcagcggctgaccagaatcttttccatgtttaaaacggctcgttgccccgccggcgaaaccagcccgtcaaggacaggcgttcacgcgtagcgggcaggacttcgtggggcacctcgcccgacaggaataccaccaggcaacccccggcaggcaccacgtcgtattcgacaccgcccttgaggtacatgcgcagttggccgccatgttcgggcagccaggcgtcgttcaagtaaatcaccgccgagaccatgcgccggtcgtcgtcgcgaaaacggtctacatgcttgaggtaaaacgcccccggcgggtacatcgcaaagtggctttcgaaatcttccaggcccaggaacaggctgcgattcatcgccaggcgcaggccgtccatcacgcccatataggtgtcgcagatagacgcgtcaccctcctccagccactggatatggtcaccgcgaatgccttcgcgaatctcctgggccggcccacgccctaccgctgcgggcgccaattcaccctgcgccgcacgtttacggcactcagccgccagctccagggtcagagcctggggcaggaagccattttgctgcgaccagcctttttcggccaggtcgtcgacgatgcgttgcagcagcgggtgatcgaggggtatttgcatggcgcgcatagtatccatacgcctgaaaatccgacagcgccgttgagcgtccgaatacactttagtcaggtgactgataggacttctcgacaaatcctacgcccgacacggacaatagtggccgactgacaggagtccttatgcgtcgtttgtttttttctgtgttgatgttctgcgttttgcccgcctgggcagacggccatgaccagttgtataaggtcgccggctgggccgaacaacgtgcgcacttcaatgacgccctcagtgccgcccagcagcgctaccgcaatagcctgccgccagtggtgtaccaggcgctggtggacaacagcaataaacgctttgccgcccaggccatggaccagcgtgccgaggcgcaactgcgcaagcacttgcccgacccgaaacctgccctggcgtttttccaatcgcccctgggccgcaagattgtcgccgccgagttgctggccacgcgccgcgaccaattggcgaaaaacgcccagggcctgcccaaactcgaagccgatgccacccgcagcctgatcatcggccacctggcccaggccctgcccgcccgcgaggccggtgccgaggtcagcctggcgattgcgggcgtggcggccgacagcttgagccagatgatccccggcttgctaggcggtggccaggcacaaggcatgttgaatggccagcgcgagcggctgatgcagcagatcgacaaggatttgaacaataccttgctgtatgtctatcgggatttgtccgacccggagctggaagagttcgccacctttgccgagtcgccggagggcaaggcgtattaccaggctgcccttgccgccattcgcgcagggcttgccgttggccagagcacctcaagcctgacgcagtaaaccctgtgggagctggcttgcctgcgattgcgatctgtcagttacaccgctatcgcaggcaagccagctcccacatttggattgcgttatttcaggtggcttgtgagaaaactgaagtactcatagcgaatctgcggaatttcattggccaagtgatgccgaccctgcttgagcatcaacacctcaggctgatcgaacttaccccgcaacacctgcagattgtgctgccagtccaccgtcatatcttcctcaccctgcacgatcaccgggcgccgggggctgcggggtgcggcttcgatgcgtttgatccagcgcgccagcgaccccacccaggcggtaggcagttggcgaggctgtagcgggtcggcttccaggaacggcttgaacgccgggtcgttggagttatcgctgaaacgccgggcgatgcctttgacgaaggggcgcagcaggtaatagctgacctgcgaccaaccccaggcacgcggccgcaccaacggcgacagcaggaaggtcttgccctgggccgggctttgggcgccgtggttgagcaggtggtccaccacgatggcgccgccggtgctttgcccgaacaggtgccagggttgcggcaattgcaaagccttggcctcgacgaacaacgcctgcaccacgctctggtacaccgcaaagtcatcgatgctggcgcgcacgccgctggacaagccatggcccggcaggtcgcaggcgatcaccacgaagccctggtccagcgcccaatccaccacatggcgatacagccccatgtgatcgtagaaaccgtgaaacaggaacatcgtcgccaccggcgccggcggccaccagacctgggccaccacctcaaacccatccacctcaaaacgccccaggcggctcaccgccggcacctggcgtgcggccaggtcgagcccgtagaaacgctggtaaaccctcgcctcggctgacagcggctgcgcatccaccagggggcgcaagctttcgcgcagatgatcagggtcaaaggtaacgggcataaaggcttccagacttgcggtgaagatgaatatcgagctgcgatattcatctgtcaggacaagcatggcaagctacgcgacctgcgaggatacatccaatgcgaccgccctaccgtaacgccctgttcgccagcgtgatcctggttatttgcgccggggtactgtgggcggcctatgactggttccagggccgctacctgcgcgccttcagcgaacacaccgcggtattttccggcgatgcgctgcaactgcccgccgccctcagcggccctggcccgattcgtctggtgcacttctgggacccggcctgcccgtgcaatgtcggtaaccagcaacacctgggcgagttgatcgagcagtacgcgccccagggggtggagttctatgccctgcaaaaacccggcagccacggccagttgcccgagaacctgcgccacctgaaagtccttgatgccctggccggcgccgaccagatacccgccagcccggccgtgggcatttgggaccgcaccggcaagctggcgtatttcggcccctatagcgaaggcctgacctgcaacgccagcaacagttttatcgagccaattctcaaggcccttggaaccggacgcgacgtgaatgccactcacaccctcgcggtaggctgctattgttcgtggcctaaggatctgtagcccgtccactttggtaaggaatgttcatgaagcgcgtcttgcaggtttttgcggtgctgattgtgctggtcgccctgggcgccggttggtacgtctacagcaaacaacctacgcgccagggcacggtgacgctggcgcacctgcaaggctcggtcacggtgcgttacgacgaccgtggcgtaccgcatatccgcgccgagaacgaagccgacctgtaccgcgccctgggctatgtgcacgcccaggaccgcctgttccagatggagatcatgcggcgcctggcccgtggcgaactggccgaggtgctggggcccaagctgctggacaccgataagctctttcgcagcctgcgcatccgcgagcgtgccttaagctatgtggagcatatggaccctggctcagcctcgtccaaggccctgcaagcctacctggacgggatcaatcagtatcaggacagccacgccagccccatggagttcgatgtgctgggcatcgccaagcgcccgtttaccgccgaagacagcatcagcgtcgccgggtacatggcctacagctttgccgcggcctttcgcaccgagccggtgctgacctatgtgcgtgaccggctgggcagcgactacttgaaggtcttcgatctcgactggcaacccaagggcgcactcaacctggcggccagcgattggcagacccttggcgccatcgccgccctgagcgaacaggccctggccgacaacggcctgccgcagttcgaaggcagcaatgcctgggccgtcagcggcagccatacccaaagtggcaagccgttgctggcgggtgaccctcatatccgtttttcggtgccttcggtctggtacgaggcgcaactgtcggcgccaggcttcgagctatacggctaccacaacgcgctggtaccggtggcgttcctggggcacaacctggacttcggctggagcctgaccatgttccagaacgacgacctcgacctggtcgccgagaaggtcaacccaaacaaccccaaccaggtctggtatcacgaccaatgggtggacatgagcagcagcgagcagcagatccaggtcaagggccaggcgccggtgaccctcaccctgcgccgctcgccccacggcccgatcatcaacgatgtgctcggtgagaacgccggcagcacaccgattgccatgtggtgggcgttcctcgacagcgaaaacccgatcctcgatggtttctatcagctcaaccgtgccgataccctggccaaggcgcgtgccgcggccgcgaaggtctcggcgccgggcctgaacatcgtgtgggcaaacgccaagggcgatatcggctggtgggcggcggcgcagttgccgatccgcccggccggcgtcaacccggcgttcatcctcgacggcagtaccgcccaggccgacaagctgggtttctaccccttcagtgccaacccccaggaagaaaacccgccgcgcggctatgtggtgtccgccaatgcccagccagcatcgcccaccggcatgccgatccccggctattacaacctggcggatcgtggccagcagttgaacgtgcagttgagcgacaaaagcgtgaagtgggatgtgaccaacagccaggccctgcaactgggcaccaccaccgcctacggcacgcgcctgctggcgccgctgttgccggtgctgcgcgaggtggtcaaggacccggcgcaactcaaattggtggaacagcttgccaactggaagggtgactacccgctggactccaccagcgccacgctgttcaaccagttgctgttcaacctcagcgacgcgacctttcaccccaaactcggcgatgccttgttcaagaccttgctcggcacccgcgtgatcgacgccgcattgccccgcctggccgcatcggcagactcgccctggtggaacggcaaccgcgccgataccgtcaagctcgcctgggacaacagcctggcccacctcaaggcgacgttcggcgatgacccggcgcaatggcagtggggcaaggcgcacaccctgacccacggccacccgctgggcctgcaaaagccgctggataaaattttcaacgtcggcccgttcccggcgccgggcagccatgaggttccgaacaaccagaccgcgctgattggcccggcaccgtggccggtgacctacggcccgtcgacacggcgcctgatcgacttcgccgacccgacccacgccctcaccatcaacccggtggggcaaagcggtgtgccgtttgatacgcactatggcgaccaggcgcagagctatatcgagggaaggtacgagcaggcgcacttcagtgatgaggaagtgacggccaatacccgcggcaccttgaaactgctgcccgcccgatgatcgttcccacgctccgcgtgggaatgcagccgtagacgctccgcgtccgcccttaaaagcggggacgcagagcgtcccaagaggcgttaccacgcagagcgtgggaacgatcatcgctcaaaccggcgccgcaaagttaagcctgaactgttgcggcgtgacgcccagccggcggttgaacacactgcgcatgtgctgggcgtcgcgaaagccacattgataggccacggttttaagcggtgcatggctgctttcaagcatcacccgcgccgcatccacacgcgccctctcgacaaactccgccggcgtaatccgcgcttcacgggcaaacacccgggagaaattacgtgcactcatattggccgccttggccaggtcggcaatggtcaggtctcccgtcaggttggccaacacgtacagctgcaccagcgccaccgccgaggtggtttcggcatggggggttaggaacgggctgaactgcgattgcccgcccgagcgctgggtgaacaccaccaggcgcttggccacgctcagggcgacttccgggccgtgatcctgggccagcagatacaacgacaggtcgatacctgccgtgaccccggcggaggtgtagagcttgccatcctgcacatagagacggtcggcttcgacctgggccgaggggcacaggcacgccaggctggcggcgtcgttccagtgggtagtgacggtcttaccgtccagcaggcccgcacgggccagcataaaggcgccgttgcagatcgagccgaagcgctgtgccttcgcggcggcagtgcgcagccaggcgtcaaactcggggccgaaatcttcgaagggtaactgcgggccaccggcgaccagcagcaggtcgtagggttgtcgggcttcgctgtagtgcttgtgcgcctgcaatgacaaaccgttggaggccgccatggcgccgtggccgaagccgagcacttccagccgatagtgagcctcgggcgccaggaagcggttggcctcgcagaacacatccatcggcccggtcacgtccagcgactgaacaccaggaaagatcaggatggcgacggttttgcccatactcacaaacacctttttccactgaataaacaccaatcccttgtgggagctggcttgcctgcgatgcagacgcctcggtatctcaggtacaccgaggtgatgctatcgcaggcaagcaagctcccacaggggatcgcttacaggcttggcacgatgtggtggcacattggccgggatcgcctccctgtggcgatagccgctcctgggtcatgggaccagactggaatctttccagaggagatcccccatgagcaccaccatagccggtatccagattcctgacagcgccttggcccgggccaccaccgaatacatccgcgacgtcgaatcggacctgctctaccaccattcgcgtcgggtcttcctgttcggcgccttgagcggtgagcgcaaacagttggcctacaacccggagttgctctacgtcggcgcgatgttccatgacctgggcctggtggaaggccaccgcagtgacgacgagcgtttcgaagtggacggcgccaacgccgccgccgcgttcctcaagccttatgggttgagcgatgacgatattgaacaagtgtggttgtccatcgccctgcacaccacgccgggcgtgccgaaacacctgcgccccacggtggcgctggtgaccgctggtgtggagatggacgtgctgggcatggactacgccgccttcagcagcgtgcagcgcgaagcggtggtgcatgcgcatccacggggtgaagggttcaaggagtgcatcatctgcgcgttcgccgacggcttgcgccatcgcccgcagaccacgtttggcaatgttaagaccgatgtgctggtggaccaggagcctgggttcaagccgatgaattttgtgcaggtgatccgcacatcgccgtgggctgactgaaacccgattttataagcaccgcaaaactactgtgggagctggcttgcctgcgatggcggtgggtcagcatcttataagtgactgatacaccgcaatcgcaggcaagccagctcccacattttcaccctgttccggcagttagaccggtgctggcgcccggcgcttgtccggctgttgccagccatccgccgcagcttcttcaatcgcctgctggatggccttcttgcgatgctcttcggcccgacggctgaagaaccacaccaggaaggtcaccagcgacaccgccaacagaatcaggctcgccacggcgttgatctcgggcttaaccccaaggcgcaccgccgagaacacttccatcggcaaggtggtggaaccggggcccgacacgaagctggcgagtaccaggtcatccagggacagtgcgaaggacatcatcccgcccgccgccagcgacggcgcgatcatcgggatggtgatcaggaagaacaccttccacggccgtgcgcccaagtccatcgccgcttcttcgatcgacaggtccagctcacgcaagcgcgccgacaccaccaccgccacatacgccgcacagaaggtggtgtgggcgatccagatggtgacgatgccacgctcctggggccagccgatcatctgcgccatggccacgaacagcagcaacagcgacagaccggtgatcacttcgggcatcaccaacggcgccgtcaccaggccaccgaacagcgtgcggcccttgaactggctgatgcgcgtcagcacgaaggctgccagggtacccaacgccaccgccgccaccgccgtgtagcaggcgatttccagggatcgggccaccgagcccatcaactgggtgttgtccaacaggcccacgtaccacttgatcgaccaaccgccccacactgttaccagcttggattcgttgaacgagtagatcaccaggatcaacatcggcaggtagatgaacaacaagcctgcgaccagcatgaagctggagaaacgaaagcgcttcatatcttgccctccagctctttggcttggctgcggttgaacaggatgatcggcacgatcaggatcgccagcatcaccaccgccagggcagacgccaccggccagtcacggttgttgaagaactcttgccacaacaccttaccgatcatcagggtttccgggccgccgagcagttcaggaatcacgaactcgcccaccaccgggataaacaccagcatgcaaccggcgatgatgccgttcttggacagcggcacggtgattttccagaagctgttgaaggtgctcgaccccaggtcggaggcggcttccagcaggctctggtcgtgcttcaccaggttggcgtacagcggcaggatcatgaatggcaggtacgaatagaccacaccgatgtacaccgcgacgttggtgttgaggatctgcagcggctcgttgatcaagcccatggacatcaggaagccattgagcaggccgttgttgctgaggatgcccatccacgcatacacccggatcaggatcgcggtccaggtgggcatcatgatcagcagcaccagcacggtctgcatctctttgcgcgcggtggcgatggcgtaggccatcgggtagccgatcagcaggcacagcagcgtgctgaaaaacgccatcttcagcgagcccaggtaggcggcgatgtacaactcgtcgcccgccagcaagctgtagttggccaggttcagcaccacctccagcttttgctcaacgtaggtatagatctcggtatagggcgggatcgccacatcggcttcggcaaagctgattttcagcacgatgaaaaacggcagtgcgaaaaacaggaacagccagaggaagggaatcccgatgaccacctgcttgccattgggcacgatgcgatccaagcgccgcttgaatttcttcatgttcatgagcgaagtaccacgccgctatcgtcttcccaccacacatacacctggtcaccccaggttgggcgctggccacggcgttcggcgttggcgacgaaggactgcaccagcttgccgctcggcagctccacgtagaacaccgagtggccgcccaggtaggcgatgtcgtgcaccttgccgctggaccagttgtgctcgcaggttggcatttcggtggtcaccagaagcttttccgggcgaatggcgtaggtcaccgacttgtcttccaccgaggtggcgatgccgtagcccacgtagatgtcgcggtccaggtccgggcacttgagcaccgcgtggccttcagcgtcgtccaccacttgggtgtcgaagatgttgacgttgccaatgaactcgcacaccaggcggctggtgggggtttcgtagatatcgatggggctgccgatctgggcgatccagcccaggtgcatgatcgcgatgcgttcggccatggtcatggcctcttcctggtcgtgggtcaccatcacgcaggtcaccccaacgcgctcgatgatctccaccaactcaagctgcatctgcgagcgcagcttcttgtccagcgcgcccattggctcatcgagcagcagcagtttcgggcgcttggccaaggaacgggccaacgccacacgctggcgctggccgccggacaactggtgcggcttgcgcttggcgtactggctcatctgcaccagcttgagcatctcggccacgcgtgcgtcgacttcagccttggggatcttgtcctgttgcaggccgaaggcgatgttctgcgccacggtcatgtgcgggaacaaggcgtaggactggaacatcatgttgatcggccgctcgtagggcggcatgtcggtgatgtccacaccgtcgaggtagatgcgaccttcggttgggcgctcgaaacctgccagcatgcgcagcaaggtggatttgcccgaacccgaaccgccgagcaaggcgaagatctcgcctttcttgatttccagggacacatcgtccacggcaatcgtctcgtcgaacttcttcgtgacccggtcgattttgaccagcacctttttcggtgtctggtcgccctcgagggctttcttataggcgccggaggcaactgccatttacgaaactcccaaaaaaaactgtgcagccggcccaatgcgggccagccttggatagtttgagccttacttgcccgtcttgaccttggtccagctacgggtcattaaacgctgcactttcgggggtagctcaaagttgacgaatgtccgctcgagaaccgcctgcggtgggtaaaccgctgcgtcagtgcgtatcgattgctccatcagtttgtccgcccctgggttagggttggcgtaaccgacttgatcgctgacctgagcgatcacctcaggctgcagcaaatagttgatgaaggcgtgggcttccttgacgttgctggcatccttgggaatcgccagcacgtcgaaccacaggttgccgccttcttttggaatcgtgtaggcgatgttcacgcctttgcccgcctctgctgcgcgagccttggcctggaacacatcgccggagaaaccggccgccacgcagatgttgccgttggccaagtccgagatgtatttggaggaatggaagtaggtcacgtagggccgcactttcagcaatttttcctcggctttcttgtagtcggccgggttggtgctgttggggtccaggcccatgtagttgagtactgccggcagcatttcatcggccgagtccatgaacgacacgccgcaagtggccagcttcttcatgttttccggttcgaacaacacagcccaggagtcgatcttgtcgacacccagcacttgcttgaccttgtcgacgttgtagccaatgccgttggtgccccacaggtacggcacggcgtattggttgcccgggtcgttcttttccaggcgtttgagcagtaccgggtcgaggttggcgtagtgggtcagcagtgacttgtcgagcttctggaacgcgccagccttgatctgcttgcccaggaaatggttggacggcaccacgacgtcgtagccggtacgcccggcgagcaacttgccttccagggtttcgttggagtcaaacacgtcatacacgggcttgataccgctggccttttcaaagttgaccaaggtgtcggggccgatgtagtccgaccagttataaatatgcaccgtcggtgcggcctgcacgctggcagccagcgtgatacctgcacccaccagcatggctttgcgaaataaagaaattggcaagtggaggtcctcttaatagttggggccttgaagttgttgcccggcaacaaaaccggcgcgcaacttaccgtcgataaaccgatccggcaaaactttctgtcatttattttctgtacggttgccgctgtttgtaggagcgagcttgctcgcgaagaactcacaggcaacgcgggcgaccagaggcgctgcgttatcgttgacgattttcgcgagcaagctcgctcctacaggtttgtgcgttatttaccggatttgattttggtccagctacgggtcatttcacgctgagttgccgccggcatgtcggcaatggcgtagagcttggattgcacttcggccgacggataaatacccgggtcgctggtgatgtctttatcgaccagggcggtggctttctcgttaccgttcgggaaacgcacactgttggtgatcgccgccatgacgtctggcttgagcaggtagttcatgaatgcgtaggcagcgtcgacgttttcggcatccttgggaatggcgaccatgtcgaagaagctgccagcaccttccttgggaatgtcataggcgatcttgaccttgccaccggcttcagccgcgcgggttttggcctgttcgatgtcacccgagtagcccacagccacgcagatgttgccgttggccaggtcggagatgtacttggacgagtggaagtagccgatcgaaggacggattttcatgaacaggtcttcggcctgtttcagatcagccttctttgtagtgtcggtcggcaggcccaggtaatgcagcgctaccggcagcatttcggttggcgaatcgaggaagctcacgccgcagcttttcagcttggcgatgttttccggcttcatcagtacgtcccacgagtcgatcttgtccacgcccagtgcggccttgaccttctccgggttgtagccgatgcccatcgagccccacatgtacgggaaggcgtgcttgttgtccgggtcgctgaccgatacagccttgagcagggatttgttcaggttgtcgtagttggacagcttggacttgtccagctcctggtagacacctgccttgatctgcttggcgaggaagctgttcgacggcacgacgatgtcgtagccggacttgcccgccagcaacttggcttccagggtttcgttgctgtcaaaaacgtcgtacaccactttgatgcccgactctttttcaaagttggcgatggtgtccggtgcaatgtagtcggaccagttgtagacgtgcagcactttgctgtctgcctgggccgcgcccgccattgcgcccatcagggacaaggcgaggagggtcttgccagcgttcttcaaacctaatgccttcatttggtgatgctccaattttttcttttttgggccacaagcgttgtatgttttacggcccaaccgaagggcaacaaaacagggcgacagtctggcaagttcaggggccggctttcaaccaaagcccctgcatttttaactgcccaatgcaccgcgcactgagcctagcacttagccctgcaaggcagccaaagtcaggtccaggcaatggcgggccttggttaccagctcgtcgatttcagccttgctgatgaccagcggcggcgaaatgatcatggtgtcgcccacggcgcgcatgatcaggccattctcgaagcagaaggttcggcagatcatgccggcgcctttgccttcgtgacgcttgcgcgtcgccttgtcctgcaccagctcgatcgccccgagcatgccgacgccgcgtacttcacccaccagcggatgatcgcccagttccctcagacgtttctgcaaatacggtgccgtttcttcgtgcacacggttaacgattttttcatcgcgcaggatgcggatgttttccagggccacagccgcagcgaccgggtgaccggagtaggtaaagccgtggttgaaatcgcccccttcgttgagcaccgccaccacttcgtcgcgcacgatcaggccgcccatgggcacgtagcccgaggtcaggcccttggcgatggtcatcatgtgcggcttgaggtcgtagaaatcgctaccgaaccactcaccggtacggccgaaaccgcagattacttcgtcggcgacaaacaggatgtcgtacttggcgaggatttccttgatgcgcggccagtacgtggtaggcggcacaattacgccaccggcgccctggatcggctcggcaataaaggcgccgacgttgtccacgcccagctccaggattttctcttccaactggttggcggcccacacaccgaattcctcggggctcatgtcgccgccttcgccaaaccagtacggctgggcgatgtgggtaatgcccgggatcggcaagtcgccctgctcgtgcatataggtcatgccgcccagactggcgccggccacggtagagccgtggtagccattcttgcgggcaatgatggttttcttgttgggctggcccttgatcgcccagtagtggcggaccatgcgcaacatggtgtcgttgccttcggagccagagccggtgaagaacacgtggttcatgccggccggcgcgacatcggaaatgaccttggccaactccaataccggcgggtgtgcggtctggaagaacaggttgtagtacggcagttctttcatttgcttggcggcggcatcggccagttcatcgcgaccgtaaccgatcgccacacaccacaggccggccataccgtcgaggatcttgttgccttcgctgtcccacaggtaaacgccgtgggctttggtgatgatccttgggcctttctctttcaattgcttgaagtcgctgaacggcgccagatggtgatcattgctcaaggcttgccattcacgggtttgcgggttgttgctggacataccgatctcctagacttttcagtgaagggcgcgccgtttgaagggcgcgcccggcgcatcagacggcgaagagcaggaattcccgctcccacgaactgatcacgcgcttgaagttttcatgctcggcccgcttgaccgcgacgtagcctgtgatgaatttttgccccaggtatttctcgatggtcttgctgttttccatgcgttccagggcgtcttcgatggtcaacggcagacgcaggttgcgtcgctcgtaaccacggcccaccaccggcgcgctcgggttatggccttcgaccatgccgatgtagccgcacaacaggctggcggcaatcgccaggtacgggttggcgtcggcgcccggcaggcggttttccacgcggcggttctgcgggccggcatccgggacgcgcaggccgacagtgcggttttcttcgccccattccacgttcaccggcgccgaggtatcgggcaggaagcggcggaacgagttcacgttgggggcgaataaaggcagcaattcagggatgaatttctgcaggccgccaatgtggttgaggaacagttggctcatggtcccgtcttcattggagaagacgttcttgccggtggcgatgtcgatgatgctctggtgcaggtgcatcgcgctgccgggctcgccggtcatgggcttggccatgaaggtggcggccacgtcgtgcttgagcgcggcttcgcgcatggtgcgcttgaacaccaggatctggtcggccagggacagggcatcgccgtgacggaagttgatttccatctgcgcggtgccgtcctcgtggatcagggtgtcgaggtccagttcctgcagttcgcaccagtcgtagacgtcttcgaacagcgggtcgaattcgttggccgcttctatagagaaggactggcgaccggtttccgggcggccggagcggccaatcggcggttgcagcgggaagtccgggtcttcgcagcgcttggtcaggtagaactccatctccggcgccacgatgggctgccagccgcggtcggaatagagcttgaggactttcttgagcacgttgcgcggcgacagctcgatcgggttgccttgcttgtcgtaggtgtcgtggatcacctgggcggtcggctcgatggcccacggcaccagaaataccgcgttctggtcggggcggcagatcatgtcgatgtcggccgggtcgagcaattcgtaatagatgtcgtcttcgacatagtcgccggtcacggtctgcaacagaacgctttcgggcaggcgcatgcctttttcggcaatgaacttgttggtcggcgagatcttgccccgggtaataccggtgaggtcgccaatcatgcattcgacttctgtgatcttgtggtctttcaaccaatcggtgagctggtcgaggttgttactcataaatgcctctgggctgggtttcctggcatccattaaaggccaggcgttggttgacgcagcatccgcgtcgttttttcattcagggtaggagcttacctgccatttgcccatgggttgcattcctcaggccaaagttgtgcagaatcacgatcggcacagcggatgagggcaggtcagtggcgtaggagatggcaaaaaggagatcggccgggccgtcaagaatattggccggtgcctgggcattcacacggggcgaacgagctgcggacaaagcctggctggagcaggcgcagacgccgattggcggcaggtgaaacatgaagcaccccggtattattgctgttatgggtttgaatcgagcttagccttgttcatttttttacacaacacccccgtaaaaaatcctacacggcccgctcaagcctgcaggtcccaagcccctcaaacccaaaaaatcgccccaaaaccccgcaaaaaaggcttcgtggcgcttttttagggcaaaaaatgcctcgcttgacttcggcaggccgttcgggttgactgaaaccagaaaagatcaatgattgatatttttaacaacaaaggtgttgcatcatgtcggtacccccgcgtgccgttcagcttaacgaagcgaacgcgttccttaaggatcatcctgaggttctgtacgtagaccttctaattgcggatatgaatggtgtggtgcgcggtaagcgcatcgaacgcaccagcctccacaaggtttacgagaagggcattaacctgcctgcctctttatttgccctggatatcaacggctctacggtggaaagcaccggcctgggcctggacatcggtgatgctgaccgaatctgttatccaatccccgacaccctgtgcaatgaaccctggcaaaagcgccctaccgcgcaactgctgatgaccatgcacgaactcgaaggtgaacctttcttcgccgatccgcgcgaagtgctccgccaagttgttaccaagtttgacgacctcggtctgaccatctgcgccgccttcgagcttgagttctacctgatcgaccaggagaacgtgaacggccgcccgcaaccgccccgctcgccgatctccggcaaacgcccgcactcgacacaggtctacctgatcgacgacctcgacgaatacgtcgactgcctccaggacattctggaaggtgccaaggagcaaggcatcccggcggacgccatcgtcaaggaaagtgccccggcgcagttcgaagtgaacctgcaccacgtcgccgacccgatcaaggcctgcgactacgcggtactgctcaaacgcctgatcaagaacatcgcctacgaccatgagatggacaccaccttcatggccaagccttacccaggccaggcaggcaacgggctgcacgtacacatctccattctggacaaggacggcaagaacatctttgccagcgaggatcccgagcagaacgccgcattgcgtcacgcgatcggcggtgtgctggagaccctacccgcccaaatggcgtttctgtgccccaacgtcaactcctaccgtcgtttcggcgcacagttctacgtgccgaactcgccgtgctggggcctggataaccgcaccgtggcgattcgcgtacccaccggctcgtccgatgccgtgcgtatcgaacaccgcgtggctggcgccgatgccaacccttacctgctgatggcctcggtactggcgggcgtgcaccacggcctgaccaacaagatcgagccgaacgctccggtggaaggcaacagctacgagcagaacgagcagagcctgcctaacaacctgcgcgatgccttgcgcgagttggacgacagtgaggtgatggccaagtacatcgatcctaaatacatcgatatcttcgtcgcctgtaaggaaagtgagctggaggagtttgaacactccatctccgaccttgagtacaactggtacttgcataccgtgtaagcggtggtagctgtcgaaggaacgccgctggctttggtccgcggcgtttttttatgggtttattttgggaaaccgagttggcctcatcgcaggcaagccagctcccacagtggatcgcatttcaaggcttgaactcggtcaaatgtgggagctggcttgcctgcgatagcggcctggcagacaacacaaccttcctgctcatacaatgcccgctgccttgtaggagacatccatgaccacccgccccgccactgttcgcaaaccccgcgcccgcagccaggcccggatcgatgcgatcctcgacgccgcccgcaccttgctggccgccgaaggtgtggccagtttgtcgatctacagcgtggccgaacgggcacagattccgccgtcgtcggtgtaccactttttcgccagtgtgccggcattgctggaggcgttgaccgctgacattcacgcggcctttcgcgccgccatccaggcgcccatcgagcatgaatctctcaagcattggcgcgacctgtcctacatcgttgaacaacgcatgctcagcatctacagcaacgatgccgcggcgcgccagttgatcctggcccagcacggcttgaccgaagtgacccaggccgatcgccagcatgatctggaattgggcgacttgatgctggcggtgttcaatcgccactttgaagtgccaacgctaccgagcgatgtggatgtgtttgccctggcgctggagttgagcgaccgcgtgtacgcgcgctcggtgcatcagcatgggctgattacgccgcgcatggcggaggaagggatgcgggtgtttgatgcgtatgtggggctttatttgccggcctatctgcccaagcgctgatcgttcccacgctctgcgtgggaatacatcccgtgacgctctgcgtcacctttggcacagcgggacgcggagcgccccaggcggcattcccacgcagagcgtgggaacgatcaggacagtgccaatcacaacttggcaatcgacacctcagtggatttcacaaaagcaatcacttcactgccgatcaccagctccaactccttgaccgaacgggtggtgatcaccgaagtgacaatgccggacgcggtctgcacgtcaatttccgacagcacgtcgccgaccacgatttccttgatggtgcctttgaactggttacgcacgttgatggctttaatcgtcatgatgtttttcctgtgtgagttattgagcccaacgcaattgcgtcggcagcggtgaaacaggttcgggttccggtggagaaccggggagcgacagcacgcgattgagcacttcggcttccagcgcggccaggcggtgtgaaccacgggcccgtgggcgtggcaggtcgatggtcaggtcgaggccgatttcgccgttttcaatcagaatcacgcggtcggcaatcgccacggcttcgctgacgtcgtgggtcaccagcaacaccgtgaaaccgtgcttgcgccacaggttttcgatcagttgctgcatctcgatgcgggtcagggcatccagtgcgcccagcggctcatcgagcagcaacaagcgcggctggtggatcaacgcccgggcgagtgccacgcgctgtttctggccgccggacaacgccgccggccattcattggcgcgctcggccaggccgaccgcttccagggcttccagcgctttggggcgccagtcgcccttgaggcccaggccgacgttatcgatgatctttttccagggcagcaagcgcgcttcctggaacatcaaccgtgtatcttcaatcgcctcgtgcagcggcgcggagccggccagcagctcgccgccactggctttgtccagccccgccaacaggcgcagcaaggtacttttgccgcaaccactgcggccgaccacagccacgaactgccctgcgggaatatgcaggtcgatctctttgagcacttcgcgggtaccaaaggccttgcgcaatttgcgcaccgccagcgggatgcccttcaacaggcgcggaggttgttgagcggtcatgctgcacctcctttgacttgatacgccgggtgccagcgcagccacacacgttccagcccacgggctgccaggtcggccagtttgccgaggatggcgtacatgacgatggccagcaccaccacgtcggtttgcaggaattcacgggcattcatcgccaggtaaccgatgccggaactggccgagatggtttctgccacgatcagcgtcagccacatgaagcccagggcaaagcgcacccccaccaggatcgacggcagcgcgcccggcaggatcacttgccagaacaggctgaaaccggacaagccatagctgcgcgacatctctaccagcgccgggtcgacattgcggatgccgtggtaagtgttcaggtagatggggaacaaggtccccagggccaccaggaaaatcttcgcggtctcatcaatgccgaaccacaggatcaccagcggaatcagcgccaggtgcggcacgttgcggatcatctgcacggagctgtcgagcaagcgttcgccccacttcgacaagccggtgataaagcccagggccagaccgatgctgccaccgatcacaaagcccaggccggcgcgccagccgctgatggccaggtgagtccagatttcgccgctgaccaccaggttcaccccggcttcgatcaccgcactcggcgctggcagaatgcgcgtcgacaaccaacccgccgacaccgacaactgccacaccgccagcaataagatcggcagcgcccagggcgccacgcgatggctgattttttctaagtccataacggcgcctcagctctgcgacgcagctttgggaaggatgtcgttggcgaccatctcgccgaacgggctgacgtagccggcgcttttgggcagctcgggacgttcgatatccaggtgcgggaacaacagctcggcgacccgatacgactcttccagatgtggataaccggagaagataaaggtatcgatacccaggtccgcgtactccttgacccgcgccgcaaccgttgggccatcgcccaccagcgccgtccctgcgccgccacgcaccaggccgacgccggcccacaggttagggctgacttccaggttgtcacggctaccgccatgcaaggctgccatgcgttgctggcccaccgaatcgaaacgcgccaaagacgcctgggcgcgggcgatggtctcgtcgtccaggtgggagatcagtttgtcggcggctttccaggcttcgtcgttggtttcgcgcacgatcacgtgcaagcgaataccgaagcgcaccgtgcgccccagctttgcggctttggcgcgtacctgcgcgatcttttccgcgacggctgccggcggctcgccccaggtcagcaccatctccacctgttcggccgccaggtcctgggcggcttcggaggaaccgccgaaatacagtggcgggcgtggctgttgaatcggtgggtagagcaatttggcgcctttgacgctgatgtgttcgccctcgtagtccacggtctcgccttccaagacacggcgccagatgcgggtgaattccaccgacgcctggtagcgttcttcatggctcaagaacaaaccgtcgccagccagttcttccggatcgccaccggtgaccaggttgaacagcgcacgaccgccagacaagcgatccagagtcgcggcctgacgcgcggccacggtcggggagataatcccagggcgcagggcaaccaggaatttcaagcgctgggtcacggggatcagcgaggctgccaccaaccacgagtcttcgcaggagcgacccgtagggatcaacaccccgccgaaacccaggcggtcggcagcctgggccacttgttgcaggtaaccgtggtcgacagcgcgggcgccttcggcggtgccaaggtaatgaccgtcgccgtgggtgggcaggaaccagaaaatattgaggctcatggagttgtctcctgaatgaagtcagattacggcgctttggcaaccgcggcgggtggcgtccagatcacgtccttgatgctcaagggcttggggatcaatttgagttggtagaagctgtcggcgattttctgctgggcggcgaccacttccggggtcaaaaacagcgcgccatagccctggcgtttcaccgacgtgagggtgatatctgccggcaggccgagcagtggggcgacctgctcagtcacttcctgcgggttggccttggaccattcgcctaccgcacgcacctcttccaccaacgccttgatcacttgtgggtgttgctcggcgtagggcttggtggcgaggtaaaactgatggttgtcggcaatcccggtgccgtctcgcagggtgcgcgcttgcagttgcttctcggcggcggcctggtacgggtcccagatcacccaggcgtccacgctgccacgctcgaacgcggcacgggcatcggcgggcggcaggaacacggtcttcacgtcggtgtagttgaggccggcgtcttccagggcacgcaccagcaggtagtgcacgttggagcctttgttgagcacgacctttttacccttgagctcggccaccgatttgattggcgagttcttgggcaccaggatcgcttcgctggtaggcgcgggtggttcgtaggcgacatagagcagatcggcgccagccgcctgggcgaacaccggtggggtttccccggtaacgccaaagtcgatggagccgacgttcaggccctcgagcaattgcgggccaccgggaaactcggtccactgcacctgcacaccttgggcggccaggcgtttttccagggtgcccttggccttgagcagcaccagggtgccgtatttttgataaccgatccgcaaggtctcggcggcgtgggcttgaacgatggcgccgaaggacacagccgcagcaaagagtgcgaccagaccacgacgcaagatgacagtgcgcatggcgctctctccaactgtgcgattagggttttggctgcacctgcttggccgttgtcggctgagtaaggtgagggtttccagcttttcggggtgaggctcagatgctccagcgagcactcaacaaacgttcattcaatacgtcagggtccagcggttttggccggcgcgccatggcgctgtagagctgctccagggcttcgtgcagacgctgttcgagtaccggcaccaactgcgcctgcacgctgccttcgccataggcgatctggctgtcttcggcaaaaataccgtggagcaattcctgggccttgagggccgacagcaccggcttcagggcgtagtccaccgccagcatgtgggcgatgctgccgccggtcgccatcggcagcaccaccttatgggccaacgcacgctccggcagcaggtccagtagggtcttcaacgccccggaaaacgacgccttgtacaccggcgtggcgatcaccaggccgtcggcattggcgacttgttgcagcaggtcaatgaccttggggctgtcgaagcgtgcgtgcagcaagtcttcagccgggaagtcccgtacctggtaactcaccacttccacgccctgctgttgcagccactgacgagttttatccagcaagaccccagagcgggaacgctggctgggactgcctccaagtgttacgaccagcatgcaggagattccttgagcaagtgtcggcggttcgctgtgcggcgatggcgccaagatgggatagaccttatcagcagatttatatatctataaatcttatttattcatttgtttattccacaaatgcataagtgtttaatcaatcgccaggcgaaaaaaaaggccgtcgaaacggcctgaaaacccctgctgtgtgagacggtttgcaacttgatgcctttgctgttcatgaggccaccatcgcggggaagcccggctcccacaggggaatgcggcacaggggaatgcggtcaactgtgggagccgggcttccccgcgatggcgatattcgccttaacgattgggttgtggggtaagacgcaggtacggcttcaccgcgcgatagcccttgggaaagcgtttcttgatctcttcctcgtccttaagcgacggcacgatcaccacttcatccccatcctgccagttggccggcgtcgccaccttgtggttgtcggtcagttgcagggaatcgatcacccgcaggatttcatggaagttacgcccggtactggccggataggtgatggtcaggcggatcttcttgttcgggtcgatcacgaacaaggagcgcacggtgagggtatcgctggcattcgggtggatcaggtcgtagaggtccgagaccttgcggtcggcgtcggccaggatcggaaagttgaccacggtgttctgggtctcgttgatgtcttcgatccacttgtggtgcgagtccaccgggtctaccgacagggcgatggccttgaccccacgcttggcgaattcatccttgagcttggcggtgaagcccagttcggtggtgcacaccggcgtgaagtccgccgggtgggaaaacaacactccccagctgtcgcccagccattcatggaaacgaatcttgccggcgctggaatcctgttcgaagtcgggggcgatgtcgcccagtcttaggctcatggtatggctcctggtgagtgcttatggagcccactgtgcatggatttttgctgatttaaaaagaataaatatcgatttatctagacgataaaggaatattaaaaatcagttcattggacttgggaacggcctgaggccaacatcgctttcaaggttcgagaaggccttgagacgctgcaaaaaagaggggttcaggaagggcttgcgggggttgagcccgacttgaacagcaagacaccttgcccggcattgcgccgggcaaggttttacagtcttacaacagcgggatcgagtagctgacgatcaagcggttttcgtcctggttacgcgcgctggcgatgtcgctgcgccacatagcgtttttccacgctacgccgacgttcttcagcggaccttccggtacaacgtaggcaacagtgatgtcacgttcccactcggactggccggtgaactcggtacggttgctggagacggtgtcgatatggtcgcccttcaggtaaaccacacccgcggtcaggccaggtacgccgactttggcgaagtcgtaggagtagcgagcttgccaggtacgctcgccggcacgggcgaacttctggatctgcatgtcggtggtgatgtaagccgacgagccgtcaccctggttcagccaagggaagtcgctgctgccgttgctgacctgataaccgccaccaaaagtgtgaccggctaccgagtacaggaacaggccgctgtacaggttgttgtcgactttgccacggccggagttcacgccgccgtagttgcccgtcgagaagtaagcggactggttgccgttgttaccatcgtcggagctgttgaagtagcgcaggtcagacttcagcacgccagggccgatagcccagttgtgggtcaggcccaggaagtgttgcttgtagaaatcttccaggttgccgtagtagtactgggcggtcagatccttggtgatcttgtagtcgccaccggcgtagtagaacttgttgctcgaacgccagttcacgccacggctgttggcgccggagatggacaggctttcgttgttgctggagttacggcccttggctttttcgatctggccggcaaccagggtcaggtccttgatgtcgctggaggtgatctggccaccctggaaggtctgcggcagcatacgaccatcgttggtgacgatgaccggcagcttaggctgcaaggtacccagcttcagttcggtctgggagatcttggccttggcggtcaagcccaggctcgagtagttatcaacggcttcgccattggacttgctcgggaagatagtgccgccgtaagagctggcagtcgcaccgttggtgccgccgcccgaatccaggcgaacgcccagcaggccgattgcgtcaagaccgaagccaacagtgccttgggtgtaaccggagatgaaacgcagatcgaagccttggccccattcttcgttgcggctcgggttggccgtgccttcgcggttatcggtgttgatgtagaagttacgcaggcccagtgtggccttgctgtcttcgatgaaaccggcagcgcctgcttgctgggcgattgcgcccaacgttacagccacagccaaggtggacttcttcatgtaccgctcctctcatttctaatttttgtatttctttggtctcgggtctgacgccctcgatccacagatgcgcgattagcgccagatagtgactaccaagtcaatcgtaacctagtgtgtctactaccttcgtctaatcgcagttgatttggtccctgcagggtaatgagtttttcatacacccaaaaagaattatttcattctttttcatacgatccaggaataagactttccgtgaagctggccggtcaggatagacgcgccgctccataagctaattcctaaagggtatttactggtgcttttttagatcgattagtgtggtcgtacggttgcatacgtcactcacgatcaaaaaggcgacgccatcatggccaaacgcacatcctcccgtcaatttgttacagtttttgtatcgctattactttcttttggtgtcaacgccgccgacctgacggtgggctaccagaccggcatcgatcccagcaaggttccccaggccgacggcctgtacgaaaaagccatcggcgaaaaaatcgcctggcgccgcttcaacagcgggccagaggtggtcacggccatcgcttcgggtgatgtgcaaatcggcaacctcggctccagcccgcttgcggcggcggcgtcgcgcaacctgccgattgtggcgtttatcgtatcggcacagatcaacgcttctgaagccctggtggtgcgcaacggcagtggcatcgacaaccctcaagacctgatcggcaaaaccatcgccaccccgttcgtctcgacctcccactacagcctgctcggcgcgctgaaacactgggggttgaacacccagcaagtcaaagtggtgaacttgcagccagccgaaatcgccgccgcttggaagcgcggcgatattgatggggctttcgtgtggtcgccggccctgggcgaaatccgcaagaccggcaaaaccctgacagacgcggcgcaggtgggccaatggggcgcgccgacgtttgaggtgtgggtggcgcgcaaggattttgcgcaaaaacatcctgacgtcgtggccaagttcgccaaagttaccctggatgcctttgccgactatgccgcccacaaagacagctggacggtggattccgagccagttcagaaaattgccaaattgacaggttcaaatgccgacgacattccggaactcttggctggtacgacgtttccggatgcgcaggcacagcaaaccgctgcgctgctcaagggcggcacggcgaaggcgattggggagacggcgaagttcttgaaggaacaggggaaggtggagacggtgctgccggattattcggcctacgtgaccgataaattcatcccagaataaaagcgcggtccagtgtgggggctggcttgcctgcgatgccagcaactcggtccttcagataaaccgaggcgccgctatcgcaggcaagccagctcccacacagagcagtaatcttttacagggccttttcgaagatcttggagttgcgctgatagttgtacagcgacgcccgcgccgacggcaggcggtctacgctgctcggcacaaagccgcgttcgcggaaccagtgggccgtacgggtggtgagtacaaagagggttttcaagccctgggcgcgcgcccgggtctggatgcgttcgagcaacacatcgccgcgcgcgccgtggcggtactccgggttcactgccaggcacgccagctcccccgcatccgaatccgcaatctgatacagcgctgcgcaggcgatgatcatgccttcgcgctcgaccacgctgaactgttcgatctcacgctccagcacttcccgcgagcggcgcaccagaatgccctgctcttccagcgggctgatcagatccagcaaaccgccgacgtcttcaatcgccgcttcgcgcaccagttcgaattgctcctgggccaccagcgtaccgccgccgtcgcgggtgaacagttcagtgagcaaggcgccatcttcggcgtaactgacgatatggctgcgccctactccaccgcggcaggcttcagcagcggcatcgagcagttcggcttgatagttgctgcccaggcgttgcaggtgcgcaggcacttgttgtgggcgcaattcacgcaccaggcggccgttctcatcgatcagaccgggatcggcgccgaacagcagcaacttgtcggcacccaggtcgatggcggcgcgggtggcgacgtcttcgcaggccaggttgaagatctcgccggtaggcgaataccccaggggcgacagcagcacgatggagcgttcgtccaacaggcggttgatacccttgcgatcgacccggcgcacttcgccggtgtggtggtagtccacgccttccagcacgccgattggccgcgcggtaaccaggttgccgctggccacacgcaggcgcgagccctgcatcggcgaggacgccatgtccatggacaagcgcgcctcaatggcaatgcgcagatggcccaccgcgtcgatcacacattccagcgtcgcggcatcggtgatgcgcaagccttcgtggtaagccggggtaaggccgcgtgcttcaaggcgggtttcgatttgcgggcgcgagccgtgcaccagcaccaggcgcacacccaggctgtgaagcagcaccaggtcgtggacgatattgccgaagttggggtggtccacaccatcgccgggcagcatgaccacaaaggtgcagtcgcggtgggcgttgatgtagggcgaagcgtgacgaagccaattgacgtattcgggcataacacctgggcctgtaataaaaagcagccaaataaaggatcaatcgtgaaagcgcacagcggctgatggttatcgtcggaacaggcttggcgacacgctcactctccttatgtacgaatgggcaggggttaatttatgcaggtttcaggcagtagtgttcgatcagttcccgcaatagacgcactgtaggcgtcaagcgtgacatttcaaggtattcgcccggctggtgggcgcaggcaatgtcgccagggccgagcaccagggtttcgcaaccgaggcgctgaagataaggcgcttcggtgccgaacgctactgcttcggcacgatgaccggtcaaacgttccgccacccgcaccaactcggcgtcttcgggctgctcaaagggtggcactgcggggaacaacggcgcgtagtcgatcttgaccttatgccgctcggccacgggttcgagcttctggcgaatcgcggcgcgcagcacctcggggtccatgcccggcaggggtcgcaggtcgaactccagggagcactggccacagatgcggttggggttgtcgccgccgtgaatgcagccgaagttcatggtcggctgcggcacgctgaattgcgcgttgcggtactcgcgctgccaggccaggcgcaggccgcgcaactcgccaatagcgtcatgcatggcttccagggcgctgtggcccaggctggggtccgacgagtggccgctgcgcccgaggatgtcgatgcgctccatcatcacgcctttgtgcaagcggataggcttgagcccggtcggctcgccgatcaccgccgcacgacccagcggccgccccgcctcggccagcgcacgggcaccggacatggagctttcctcgtcacaggttgccaggatcaacagcggttgcttgaagggttggcccagcagcggcaataccgcctcgataaccagggcaaagaaacccttcatgtcgcaactacccagtcctacccagcggccgtcgacttccgtcagcttgagggggtcggtgttccacagcgccgcgtcatacggcacggtatcgctatgccccgccaacaccaagccaccggggccgctgccgaaactggccaacaggttgaacttgccggggctgacctgttggatatcgatggcaaagcccaggtcgcccaaccaagcggcgagcaggtcgatcaccggacggttgctctggtcgagagacgcctgggtgcagctcaccgacggcgcggcgatcaaggcggcgaactgctctttcatggacggtaacggcatgcgcggtctcccaacttcccggatgaacctcactatagaggcatctgcgcaacacaataaaccgttgcggcacgttgccgggctcagtcctgtacactgcacgaccttggcagccacacttttccccggctgcgctcccgatcctggattttccggccatgcagaaagaaaccgaaatcaagctacgcgtcagccgcgaaacactcgttgcgctgcgtgagcacccgttactgaaaaaacgcaacaaaagtggctgggaacgccgtgagttgatgaaccagtacttcgacacccccgagcgtgacctggcccaggccaaggttgccctgcgcctgcgcaaggatggtgacgacatcatccagaccctcaagacccgcggccaaagcgtcgccggcttgtcggaacgcaacgaatacaactgggacctgcccaaagccaagctcgacgtgaagaaactcgatggcgagtgctggcccgagcaactggccgagctggacaaaaagaccctcaagccgatcttcaccaccgacttcgtgcgtgaacgcgccgagatcgcttggggccgtggcaaggccaaggtggtgatcgaagccgccctggacctgggccacgtggtggtcggcaagcagaaagaagaaatctgcgaactggagctggaattgcgcgaaggcgaaccggctgccctgctggaattggctgccgagctggccgcgaccctggccctgatgccgtgcgacatcagcaaggccgaacgcggctaccgcctgtatgacgccagtagctattccctgagcttgccggcgccacagatccacgccgaaatgccattggacgacgccttcgccgcgatcctgtggtacctgctgggcagcagccagcgcctggccgagcaataccgcttcaatggccactggcgcctgctgcaagactgggtcgagaacctcggtgaattgcgcgccctgatcggcagcctcggccaggccgcgccgcgccaatccaccagcgaactgcgcagcgccctggatgcgttgctggaagactggcgcccgctggtccaggccggtgacgacgatgaagacatccgcaaagccgcgccagagcagttcatcgaagagctgcaagacgtgcggtggggcctgttctcactcaacctctcgcgctggttgttggctcgcacctggacagccgaacgtaacgtgcgtggcaaccgccagggcgctgcgcaaatcaccaactggctgccacgcctgctggccgacgacgccgtcgccctgcaactgcagcgctaccagcaacagccggaagacctggccgagcaactgccgcgcatcgaacgcatccaggcctggctgcaccatgcgcgccaggtggtggacattcctgaactggaccgcttgtacggcgagctgaacaagctggcacacctggccaaccagccgattaccgatgaatcgctggatgcgcgtatgcaccaggcgattgcggtgtatcagaaccgtgcctggaagacccttctgcgcctgtaataccgctatcgccgggtgcatacgcgcatccagcgagtcatcggttatcggctggttggtaagagacagtttcctgtgggagcgggcttgcccgcgatgaggccctccctgtcagcgcaatactggcaggctggtggtggacttgatttccgacagcgccacaatcgagttgacctcctggatgcccggcaccatcgacaacttctcgaagaagaaccgctcgtacgcctcgatatccgaggtgacgatacgcagcagaaaatccaccgctcccatcagcacgtagcactccaacacttccggaaaaccgcgaatcgcctcggtgaactcagtgaaattggagcgaccgtgggcgttgagtttgacctcggcgaaaatctgcgtgttgagcccgattttcttgcggtccagcagggtgacctggccgcggatcacgccctcttccttgagccgctgaatgcgccgccagcatggcgactgagacaggccgacctgctcgccaatctgtgcgctggagagcgaggcgtcctcttgcagcaaggccaggatgcggcggtcgtaggcgtccaactcactgtgcataaacgtacccgttaataggctgatcttgaattgattgagtcgatttatcgccaaacaggctcatcttagataagaaatctcccgaggcgaatgtaaaaattcctccagtcgaatttggagagtcagcatgcacgccgtcgaaaccgcctaccctgccacccgcgtcgatgcgtgggcggccaatagcagccactgccgggcgcactatcacatcgtcgccgaggccgaaccggacgtgctgtgccgggtgctcaactacttcgcgctgcaattgctcacgcccacccaggtcagcgcgaaccgggaagccgacctactgagcatcgatatcgtgatgaccggcctgagctggcaccgcgcccaggtgatcggtgaaaagattcgaaacctggtcagcgtctgcaccctggagctgtggtcggctgattccgagcggccccaagcgttggcggcgatggcgcagtaaaaacctgcaatacacgcgcaggcaggatcttcagcggctcgctagcctgggattacacccaagccgcccaggaaaacctgcatgcccgtcgccgctcacgatcaccccttggaactgcagcaattgttgccggcgttggtcgagcaagggctgatcacggcgcaggcggcgcaaaaggtggtgccagcgcccgccagccagcaccccctggaatgcatcgcagcccagggcccttgcctggagaccttgacccaatggctggcccggcaggtcggccagccttacctgcacatcgacccgttgaagatcgatgtggcagccgtggtgcccttgatgtcccacgcctttgcccagcgccacggcattcttgcagtcgccgtggatgcccgcagcgtaacggtcgccagtgcccaaccccatatcaccgcctgggaagccgggctgtcccaggtgctcaaacgcacgatcaagcgcgtggttgccaacccccaggatatccaacgctgtatcaacgaattttaccgcttggccaagtccgtcagcggcgcggatcaaaagatgacggcgcctggcaatgtcgacttgctcagcctcggcgccagtgacaaggagccggatgccaacgacgcgcatatcgtcaacattgtcgactggctgctgcaatacgcctttggccaacgagccagcgatatccatatcgagccctgccgcgaccagggtcggatgcgctttcgcattgatgggctgctgcatgacgtctatcaatttcccccgcaggtcaccatggccgtggtcagccgcctgaaaagcctggggcgaatgaacgtggccgaaaaacgcaaaccccaggatggccgcgtcaaaaccaggaaccctgcgggtgtcgaagtggaattgcggctttccacactgcccacggcattcggcgaaaaactggtgatgcgaatttttgaccctcaggtgctgctcaaggattttgaccagttgggtttgtccaacgccgaccagcaacgctggcacgccatgacgcgacgcacccacggcatcatcctcgtcaccggcccgaccggttcaggcaagaccagcaccctctacaccaccctcaggcaactggcgacccgcgaggtcaacctgtgcacggtggaagacccgattgaaatgatcgagcccgccttcaaccagatgcaagtccagcacaacatcgacctcacgttcgccagcggcatccgcgccctgctgcgccaggacccggacatcatcatgatcggcgaaatccgcgaccaggaaaccgcagagatggctatccaggccgcgctgacggggcacttggtgctctctaccctacataccaacgatgcgcccagcgccatcagccgcctgcaggaactgggcattgctcactatttgatcaaagccacgctcataggcgtgatggcgcagcgcttggtgcgggttctgtgcagccactgcaagcgccccgtgggccaggaggacgctggcggctttgatgctgtcggctgtgcgcaatgccgtgacagcggttatcgaggccgggccgggctgtatgaaatcatgctcatggacccagccctccaggcgctggtcaccccgggtgcggacgtacaagccctgcgccgtggggcactggcgcagggcatgagcagcctgcgcatggccggcatcgagaaagtgaaagccggcctgaccacgatgacggaggtgttgcgggtcacgccaggggattcagaaacaaatcctttgtttgttgggccatgaaaccgtctttatccgtgaccagaccgttacaatcggcctaatgtcgttcactgacacctccagatagggaatcgctatgcagatcggaaccgtactgcttcttttcgtgggcttggccatcgccatcctgttcatggggttcaaagtggtgccccagggctaccaatggaccgtcgagcgtttcggccgctacaccaacaccctcaagcctggcctgaatatcatcatcccggtgatggaccgtatcggccgcaagatcaacgtgatggaaagcgtgctggatatcccgcctcaagaagtcatcaccgccgacaatgccaccgtgcagatcgatgccgtgtgcttcttccaggtggtcaacaccgcccaggccgcctatgaggtcaacaacctcgaacatgctatccgcaacctgctgcagaccaatatccgcaccgtactcggctccatggagctggacgccatgctgagccagcgtgacggcatcaacgaaaaactcctgcgcaccgtggatgaagctaccgcgccgtggggcatcaagatcacccgtatcgagatcaaggacatcagcccgcccgccgacctgatggccgccatgtccggccaaatgaaagccgagcggatcaagcgtgcacagatcctcgaagccgagggcctgcgggcgtcggcgatcctgacagcggaaggcaagaagcaggcgcagatccttgaagccgaaggtagccgtcaggccgcgttcctggagtccgaggcgcgcgagcgccaggccgaagccgaagcgcgggcgacacaagtggtgtccgaagccattgcgtcgggaaatgtgcaggcggtgaactacttcgtcgcgcaaaaatacatcgacgccctgggcaagctggcgtcggccaacaacagcaaggtcatcctgatgccgctggaagccagccaggtgattggcgccgtgggcggtatcggcgaaatcgtcaaggcaaccttcggcaaccagaaaggctgaggccaacaccatgtgggactttttgctgcatttgtcgttctgggactggttagcactgggcaccgtgctgttgattctcgaggtgttcggtgccggaggctacctgctctggatgggcatcgccgccgcagccgtgggcgtgatcaagttcctgttcccaccgctggggctggaatggcaactgctgctgtttgcggtgttgtctatactgaccgccgtgtactggtggaaacgccaacgcagcagtgccaaggccagcgatcaaccggggttgaatgagcgcggttcagagttggtcgggcgcactttcgtggtgcatcaagccattgtggatggtcgcggcaaggtcaaagtcggcgatggcgtatggatggtcaccggtgtcgacgcccccgtgggcgctcaagtccgcgtggttggccaggatggggtgattttgaaggttgaaactgtttagtcagtgatggaactggatcggcttaactacaatcaaaacgtacagataacccaccggagtcacccatcatgcgtctcaaatatgctgtcgcaaccctcgctgtgctttccctacctgtcggctcagccatggccgatagcttctggcgtaatgtcatctcgtcgggcgccaccactggctcgacttacctgacgttcaaggaccacaagctggtggtcgccgcccaagacgacgccggcagcttcgtcgccagcgacggcggcattcgcggcccgtacctggaagcggccatgcagaaggtccgcgccgataaccctggccttcaagccaccgatatggaactggctaacgccatcctggcgaagaatgctgtaaccgagtaacaactgccctcataaaaaatgccgctttctcaagcggcatttttttgcctgctgcatgacgaatcgttcatggatgacaggctatattcagtctcagcatgcaaccatgccctactgacacgtctattttaattgcctacctgaaacggatgccttcttcgtcatgagccaacagcccttcctgccgttttccaaaccgaccattgatgaagccaccatctcggcggtcggcgatgttctgcgttccggctggatcaccagcgggccgaaggtgcaggcgttcgaagcacagttgtcggagtattttggcggacgtccggtgcgcaccttcaactcgggcacctgcaccatggagatcgccttgcgcatcgccgggatcgggcctggagatgaagttatcaccacgccaatctcctgggttgccacggccaacgtgattctcgaagtcggcgccactcccgtcttcgccgacatcgacccggtgacgcgcaatatcgatctggctcaggtagaagccgcgattaccccgcgcaccaaggcgatcatccccgtctacctggccggcttgcccctggatatgccgatgctctatgcgctggccaacaagtacaacctgcgcattgtcgaagatgctgcccaggccctgggttccagctgggatggagaacgcatcggcgcaaccggcgacttcgtgtccttcagcttccaggcgaacaagaacatcacgtcgtccgaaggcggctgcctggtgttgaacaatgccgaggaggcccgtctggcagagaagtaccgcctgcaaggcgtcacccgcagcggcttcgatggcctggatgtggatgtgctgggtggcaagttcaacatgaccgacattgccgccgccatcggcctggggcaatttgcgcacatcgagaagatcaccgcccatcgtcagaacctggcacggcactacttcaaatgctttggcagcgatttcgaagcccagtacggcgcgcaactgccgccggccgacttcgaaaacagcaactggcacctgttccaactggtgttgccggagcgccaggatggcctgccggcccgtgcgacgttcatggagcagatgcagacccacggcgtgggtatcggctatcactacccgccaatccacctgctgagcctgtatcgggcacagggtttcaaggaaggcatgttcccggtggccgaacgtgttgggcgtttgatcgtgtcgttgccgatgttcacggcgatgacagaggcggatgtggagcgggctgtagcggcggttaaagctgtattgaaaagagactgatcacaacaagtcaactgtgggagctggcttgcctgcgatgctggcacctcggtgtatcggtgatacccgggtgatccaatcgcaggcaagccagctcccacattgatttgtgtcgttgtaactattgcaattattcgccgatggcggctttgtagccggcggcatccaacagcttgtccagctcggccttgtcgcttggcttgagcttgaagatccaggcgccgtacgggtcggagttcaacagctcaggactgccactcaactcttcgttgacagcaatcacttcgccggcaaccggcgagtagatatccgaggctgctttcaccgactcaaccacacccgcctggccttgcgcttcaaaattggcacccacctctgccaactcaacaaacaccacatcacccaaagcttcctgtgcatggtcggaaatcccgacggtcacggtgccgtcagcttccagacgggcccattcgtgactttcggcaaaacgcaggtcggcagggatattgctcatagtctgtgtcctcaagatgaaatgtcagcggccttcggcctgccggaattggttagatcaaggttttgccatggcgcacgaaggtcggcttgaccactcgaaccggataccacttgccgcggatttccacttcggcccggtcggcagtcgccgtcggcacacgcgccagcgcaatggatttgcttagcgtaggcgagaaactaccactggtgatctctccttcgccaacattggcgatacgaaccacctgatgagcgcgcagcacaccccgttcttcgaggacgagccccaccagtttgaactgcacgccggctgccttttctgcttccagcgcggcgcggccaatgaagttacgctcgacaggttcccaggcgatgctccaggccatgttggccgccaggggtgagacggcctggtgaatatcctggccatacaggttcatgccggcctccaggcgcaaggtgtcgcgcgcaccgaggccgatgggggaaatgccagcgcctaccaagtcgttgaaaaagcccggtgcctgatcggccggcagcacgatttcgaggccgtcttcgccggtatagccggtgcgggcgatataccagtcgccgtcggcccggccttcgaacggtttgagctgatggatcaggatgccacgggactgggtcaccagttcggcgattttctgccgggcgtgggggccttggatggcgagcatggccaactcggagcgctcatgcagttgcactgagtagctgtccagttgcgcctgcatccaggccatgtcctggtcacgcgtggcggcgttgaccaccaagcggtaaccggtttcggtgcggtagacgatcatgtcatccaccaccccgccctgctcgttgagcatggcgctgtacaacgctcggccacagccgtgcagtcggtcgacatcattggccagtaggtactggagccattccttggcctgggggccggtgacatcgatcacggtcatatgagatacatcgaagaccccgcagtcgcgtcgcacctgatggtgttcttcaacttgcgagccgtaatgcaaaggcatatcccaaccgccaaaatcgaccattttcgcgccgagggcgagatgcaggtcatacagaggcgtacgctgtcccatgggtttctccttccgggcttggcgaaggcgcgcagagctgccacttgcgccgaacaccttgtattacaaggcccgcagccacatacagcaggtcgatccgaaagacggagcgcaccgaatgccgcgcattgtagcctcaagccgtaggactggcacctaaccgatttgccgagccgagcgacgaatcagcccgatgaccggcaacaagccgaccagcaccagggtcagcgccggcaaagacgcccgcgcccattcgccttcactggtcatttcaaagatgcggaccgccagggtgtcccagccaaacgggcgcatcagcaaggtggccggcatttccttgagcacatccacaaacaccagcagcgctgcgctcaacgtgcccggcagcaataacggcagatacactttgcaaaacagtcgtgggccgctcaccccaaggctgcgtgccgcttcaggcaatgacggacggattcgcgccaggctgttttccagcggcccgtaggccaccgccagaaaccgcaccagatacgccagcaccagtgccgacaggctgcccagcagcaaaggcttgcccgccccgcccagccatccggagagcggcaccaccagctcgcggtccaagtagctgaacgccaacatgatcgacaccgccagcaccgagcccggcaaggcatagccgacattggccaggctgataccggagcgaatcgcacgggtcggcgccagacggttggcaaacgccagtatcaacgccacgctgaccgtgatcagggctgcgatcccgcccaggtagagggtatggatgatcagcccggtgtaacgctcatcgaggtcgaagcggccacgctgccagaaccacgtcaccagttgcagcatcggaatcacgaatgcacaggcgaaaaccagaccgcaccaggcgctggccgccacggccttgaatccgcgcaagtggtacaacgccttgccccgcgggcgctcattgctcggtcggctggccccgcgcgcacgtcgctcgccatacagcaccaacatcactaccagcagcaacaggctggccagctgcgcggcgctggacaggctgaaaaagccgtaccaggttttatagatagcggtggtgaaggtgtcgaaattgaacaccgagaccgcgccaaaatccgcgagtgtctccatcagcgccagggctacaccggcaccaatcgctgggcgcgccatgggtaatgccacgcgccagaacgcttgccatggcgattgccccagcacccgcgccgcttccatcaagcctttgccctgggccaggaacgcgctacgcgccagcaggtagacatagggatagaacaccagcaccagcacgatgaccacgccgctggtggaccgtacccgtggcaaacgcagacccgtgccgaaccactcgcgcagcagggtttgcaccgggccggcaaaatccagcaggcccacaaacacgaaggccagcacataggcagggattgcaaagggcaacatcagtgcccagtcgagccagcgccgcccggggaactcgcacaggctggtcagccaggccaagctgactcccagcagcgtcacgcccaggccgacaccgagcaccagggtcaaggtgttgcccagcaagcggggcatctgagtgtcccagaggtgcgaccagatctgtgggtcaatgctttgccaggacagcagcagcacgctcagcggcaacagcaccagggcggcgacgctgaaaaccggcaggtaccagcgacgttgggcggggtgggccaaggaaaagctctcagaaaaataaaaatgttgaagcggccactaaccaatgtgggagctggcttgcctgcgatacaagcacctcggtgtatcagtgataccgaagtgatgcaatcgcgggcaagccagctcccacagttgagcggcgcagcttcagttccagccagcgcgatccatcaggcggatcgcttcggcctggcgcttgcccgccacttccactggcaaggtatcggccacgaacttgccccaggtcgccacttccgccgatggcggtaccgccgggttggccgggaattcctggttgacgtcggcgaagatcttctgtgcctcaggcgtagtcatccactccaccagcgccttggccgcttccgggtgcggcgcgtgctgggtcaggccgatgccggagaggttcacatgcacgccgcggtcgccctggttcggccagaacaacttcaccgccaggtctggcttctgcttgtgcaggcgaccgtagtaataggtgttgacgatacccacgtcgcattgcccggcgttgatggcctccagtacggcgatgtcatcagagaacacgtcggtggacaggttattcacccaacccttgatgatttcttcggtcttggccgcgccatgggtttcgatcaacgtggcggtcagcgactggttatagacttttttcgccgtgcgcaggcacaggcggccttcccactgcttgtcggccagggcttcgtaggtggtcagatcgcccggttttacccggtcggtggaataggcgatcgtgcgcgcacgcaggctcaaaccggtccaggcgtgggccgatgagcgatattgcagaggaatgttcttgtcgatgacaggagaggtgaacggttgcaggatgcccatctgctcggcctgccagaggttgccggcgtcaacggtcagcaacaggtcggcggtggcgttctcgccctcggccttgatgcgctgcatcaacggggcttccttgtcggtgatgaacttgacctgtacgccggtctttttggtgtaggcgtcgaacacgggcttgatcagttcgtcgatacgcgaggagtagaccacgacttcgtcggccgcctgcacggtggtgctgccgatcagggtgagtgccagggcagtcaggaggcgcttgggtgccaacatgggtgcggtctctcatttgcaaatggagggcaaatgataaggactcacatttggtaacgcttggtggaggcgttaccagatgttgcacagccagaatatgcgctggagctgacggcctcatcgcgggcaagcccggctcccacagagggttgtattgtcaggtcagggtttggcgagttcggggagatcgcctgtcaatcccagtgcttggcgcacaaacacggctttggcttcgggcatctggtcaacgattttcaaacccgcgttgcgcaaccagcgcagcggcagttgatcggcctggaacaagcgttcgaagccttccatcgccgccatcagcgccaggttgtggggcatacgacgtcgctcgtaacggctcagcactttcacattggccaggcgctcgccgcgctcggtcgcggccagcagcacttcggccagcacggccgcatcgaggaagcccaggttcacgccctgccctgccaacgggtggatgacgtgggcggcgtcgccgatcaacgccaggccttcggccacataacgtttggcatggcgctggcgcaacggtacgcacacacgcgggtcggcactgatcacagtgcccaagcgcccctcgaaggcacgttccagttcgcggcagaagcgttcatcatccagcgccatcaagcgctcggattcagcgggcgtggtcgaccagacaatcgaacaccagtcttcctgcccatcgcgcaccagcggcaggaacgccagcgggccggtgtcggtgaagcgttgccacgcggtgcgctggtgcggctggctgctgcgcacgctggtgacgatggcgttatgcaggtaatcccattcgcgggtaggtgtaccggtcaggcggcgcacggcggagttggcaccgtcggcggctaccaccaggggtgcgcgcagcttgcggccgtcggccagggtcagcaaccagtcatcgccagagcggcgcatctgttccaggcgtgcgttggccagcaggccgaggtcgcagtcatgcaggcgatcaagcaaggcatcctgcaccacgcggttttcgacgatatgcccaagcacctcggcatgcacactggccgccgagaaatggatctgcccggtaccgctaccgtcccatacctgcatttcgccgtaggggctggcacgacgctctacgatgccgtcccacacgcccaggcgctcaagaatgcgctggctggccgccgacaacgcgctcacccgcggttcaaacgccgcagccggctcaaacggcttgacgctcaacgggctgccgtcgagcagcagcacctgcaggccactgccctgcaacgccagcgccagggcgcttccgaccattccagccccgacaatcagcacatctgcgcgcatgtccatattcaagccttgtctcgtgtgcggcacaggccgcaagtaaaggtgtggtccgcttcaaacattggaacgagtgcccaggcccatggcctgacgggcgaaccagcgtttggccgggggcaacaggtcgaggccgagcaagcccatattgcggcccagcgccaccaatggctgagcactgccaaacagccgcgtgacctggtcggagaagcctacggtgagttgctggtccaggcgctggcgctcgcgatagccttgcaacgtcgccaggtcacccggcacgtccggcccggccaacagggcttcggccaaggcactggcatcgcgcagggacaggttgaacccctgcccggcaatcgggtgcaggctgtgggcggcattgccgagaacggccaggtgcgagcgcacttgctcttcggcttccaccagggtcaacgggtacaggtgacgggcacccacttgtttgagagtgcccaggcgatatccgaacacactctgcaactcgctcaggaagctacgctcgtcaaggctggccaggcgctgagcgtccatgccgatgcgggtccagaccagcgcgcaacggttgtccggcagcggcagcaaggccatggggccttcatcggtaaagcgctcgaacgcctcgccattatgagcttcgctcggggtgatgttggcgatcagggcgctctggttgtagggccgggttttcacgccaatgcccagttgctcacgcaagccggaacggccgccatcggccagtaccgccaggtcgcattccagcacggtttcatcgttgagggtcaggcgatagccatcgggcagcggctccatacgcgtgacttccgccgggcagcgccagctcaccacgtccttgtccaagccttgccacaggcattggccgagccaggcgttttccaccacataacccagggccggcacgccctcctccatcgcggacaaacgcgcggtggagaagcgcccacggtccgatacatggatctgcttgatcggctccgcacgtcgggaaatggcctgccacaggcccagacgctggtaaatctgacgtgcgccaaacgacagcgcggaagagcgcgcatcgtagctcggctggtagctgtcacccggtgcaaagggttcgatcagcacgatcttccaaccccgcgccttggccccggcttgcaatgccagggccaggctggcgcccaccaggccgccgccgataatcgccaggttgacccggctcatcgcgcagccgccatcaacgcttcgatctcggcaacggtcttgggcacgccgccggtcaggatttcacagccttgcttggtcactaccacgtcgtcctcgatgcgcacgccaatgccacgccatttttttgccacgttctggttgtccggggaaatatagatacccggctccacggtcaaggccatgcccacttccagcacgcgccattcaccgcccactttgtactcgcccacatcatgcacatccatgcccagccagtggccggcacggtgcatgtaaaaggcgcggtaggcttcgctggcgatcagttcgtcaacgtcaccttgtaacaaccccaacttcaccaggccggcggtgatgacctgcacggtcgcctcatgggcctggttccaatgtttgttcggcgcgatctgcttgaaggcggcttcctgggaggccagcactatctcgtagatcgccttctgctcgggcgagaacttgccattgaccggccaggtacgggtgatgtcgctggcgtagcaatcgatctcgcacccagcatcgatcagcaccaggtcgccgtctttgagcaccgcgtcattctgctggtaatgcaggatgcagctgttgcgcccagcggcgacgatggagccataggccggcattttcgcaccgcctttgcgaaactcgtaatccagctcggcttccaggctgaactcatgcaggccggcacggctggcctgcatcgcccgtacatgggctgcacaggatattcgcgccgcctcgcgcatcaccctcacttctgccgccgatttatacaggcgcatatcgtgaagcaaatgatccagggcaacgaattcgttcggcggctgggcgcccaggtgcgctttggaacggatcacgttgatccactccatcacatgccggtcgaactcggcattgctgcccatggccgagtacacgcggtcgcgaccttcgatcaggccgggcaggatgtcgtcgatatcggtaatggggaatgcgtcgtcagcgccaaagtcgcgaatcgcgccctcggtgccggcacgcaggccgtcccacaattcgcgctcggcattgcgctcgcggcagaacagcacgtactcgccgtgctggcgaccgggcatcagcacgatcaccgcttcgggctcggggaaaccgctcaggtattggaaatcgctgtcctggcggtaaacatgctcgacatcacggttgcggatggccacggcggcggccggcaggatcgcgatgctgttgggttccatctgcgccatgagcgccttgcggcgccgggtgtattccgctttggggatatggatcatgggcagatgggcttcctttctcagtgcagcgacggcttgggcgcggcgggctcagcggacttgcgggtctcggtgaacagcagcagcggcgcgacgcgcaggtattccatgacttccatgtagtcgccttcgccgtcttcggattcttccagggcgtcttgcacctgggagatggccgccagatcctgcagcacttccttggcgtcggtgctcagctccaggccgccggcattcacgccgaaaccgtggaggaaaccctggcaccattggcccagcgcggcagcgcgatcagccagcggggcgtcgtcggtgggcagcagcaggaccacggtgacgtcatcaccggtcagctcgcccttgaccatttcttgcaggccgatcagcgcgttacgcacattgtcggtgggttcgatttccagcagctcggccacatcggccagccagttgtcggcatcaaagccgacaccggtgcaactgcggcccaacagcacgccgtgcagttcagcaggcgagcatggatggccgctggtgctcagcagtttggaaaaagcatcgtacggggagttctgaatgggcatggtgagctaggcgccagacggcgcaatgtctagaatggagcgctgtatcctagcaccggcagacgcaccaagactatcgagggcgtcagatcgtttatcctgcagttgccattcatcagacaaatccagtggaacccaatggaagacaccgacctgcaagcgctgatggccagactcgaactgctaattgatcgggtcgagcaacttaagagtcaaaacggactcctattagctcaggaaaagacctggcgcgaggaacgcgctcacctcattgaaaaaaacgaaatcgcccggcgtaaggtcgaatcgatgatttcgcgcctgaaggccctggagcaagactcatgagttcaagcaatagcgttaccgtgcagatcctcgacaaagaatattcgatcatctgcccccaggaagaacgcagcaacctggtgagcgctgcccgctacctggacggcaagatgcgcgaaatccgcagcagcggcaaagtgatcggcgccgaccgcatcgccgtaatggccgcgctgaatattacccacgacctgctgcacaagcaggaccgccctgacgtgcaggccagcggctcgacgcgcgagcaggtgcgtgacctgctcgatcgcgtggatctggtgctttccaccgattcagacacacccaagggctgattgccgagcaggtttaaggtatactcgccccactccctggcgtgtttgccagtcggcgatgtccctgagccgattcgcactaccctggaagttgcacgttgggctggtgtgcatgtccgctagacggaaagccttaaagcctactgcttcttccaccttgaactttcgggttcaagggctaagtcgacagcggctctgtcggggagcctgaattcccaaactcaatgccagtctccggactggcattgttttatgagcccaaaaccatgaccgaacctgcgccgctatctcgtccgcaccttcgacgcatgttgcgcaaggcccgccgcgccctcacgccaagcgagcagcgccaggccgctcacggtctttaccggcaactggcacagcacccgctgtttcgccgggccaaacatatctctttatatctgcccacggacggtgaaatcgatccgcgcctgctgctgcgtgcagcccagcgccgcggcaaagccacttacctgccggtgctcagcgcctggccgcgcaccaagatggtgttccagcgcgtacgccctggggataagttgctgcccaaccgctttcgcatccttgagccacgggtcaatgcccgccgccaacgccaggtctgggcgctggatttggtgctgttgccgctggtggggttcgatgatgtgggtgggcgcctgggcatgggcggcgggttctacgaccgcagcctggcctatcttgcccgccgccagagctggcgcaagcctacgctgctggggctggcccacgaatgtcagaaagtcgaacgcctggcgcaggcaagctgggatgtgccgttggtgggaacggtgactgataagcagtggtatgtcgcacaaacgccgctggaaacggcggcgccttagtgaatgcttgagttaacgcttgaacggttgtggctgctgctgagccagttcaaccggtgcatcggtcttgttcgaccacaggctttgggcataaccggtagtcacaacgcccagaccaaacaaaataaccaaaatccatagtaaatccggcttacgttgcatcgattgcccccctttcaggcacctcgtacacgatgacaacaacgttccaaagtagtccgttgcagctgcgtcaagcttaaaagcgcgcattctgcggtaacgtgaaccaacacgcaaaccttgacgccaaccgactgtcggtttgtcacgggattgcccgacaacttacccaacgcctttttcaggagcccaaaaatggcctactggctgatgaaatccgagcccgacgaactctccatcaacggtctggaaaagctcggcgacgcgcgctgggacggggttcgcaattatcaggcacgcaactttttgcgcgccatgaccgtgggggacgagtttttcttctatcactccagttgcccggagccagggattgccggcatcggcaaaatcatccgggccgcctacccggaccccactgcactggaaccagaaagccactatttcgacgccaaggctacaacggagaaaaacccgtggagcgcaatcgacgtcgcgcacgtgcaaacctttcccaaggtgctgggcctgggctacctgaaacagcagcccgcgctggccgagatgcctttggtgcaaaaaggcagccggctttcggtcatggccgttacgcccgaccagtgggcgacgatcatcagtattctttagctgagcgacatcaagtgctgacgtccatcggagagaaataattataacaagacattagaaatttaaaaaagaatataaaaaactgttacttatgacagtagaaagcttcatctccacgaagtctaatgactgcatagaaattggctaccgacagaattggagtagtggcaaatttttatgctttttacttaacggagattgatcatgacggacataccgaagttggataaagacgttgaaaaaactgaacacattactgcgagcgccccaagcaccacaccaaccaagatgacggtagaaggcgggtacgccccatggcggttcagtggcaagatcgaacttgagtactctcttgtaccaggctcgtcgaaaatcttagtgaggactttaagatactttctaggagcgtcatacccaccggaatattcgaaatttagcatcgaactatctggggtaagccccttagaggtactcccaagagatataaatacatggaagagttggggctcggaggatgaaacaacctctagaacctttactgtttttttcattttccaggcaatatcgggaggccccagcgcaaccgatcggaaagtcataactctgcccatttgaaagcgcctatcgcctgcggccggcaaactagccgcaggcttagttaatctgcacttattgaataatcaagttattgaacaacaaatcttccaccaccggcttgccggtttcatcgttcatcacctgctgcgtttgcttcaacgcttcctgacgcagcttttccttgccttccacactgctcatggtctcgttggtctgctgggtaaacagcgccaccagttggttgcgaatcaacggatcgttggccttgaccaacttcgccgcttcttcaccggtcacgcgcagggcaatgtcggccttgtagaccttgagtttcgcggtgccatccaggccgtaattgcccacgaatggcgggctcaggctgatatagctgaccttcggcgcctcgccctctttggcttcttcggcctgggctgccatcggcaaggtcagggccagcatcaacaggatccacgctttcacagttcattcctcgaattcggttgccgggtagcataacgctagcaaggctgagcacaagcttatgggggcttatcaggcgtgggcatgctcgttgacccacgggcgtaccctcctacacttatcggccacgacgccaaaaggaatagtccgatgaaagctgtgctgtgcaaagccttcggccccgccgaaaccctggtgctggaagagatcgccagcccggcgatcaagaagaatgaaatcctgttgaacgtgcatgcggccggggtgaatttcccggacacgctgatcatcgaagacaaataccagttcaagccgccctttccgttctcacccggtggcgaagcggcgggcgtggtcagtgaagtgggtgaaaaagtcagtcacctgaaagtcggcgaccgtgtgatggcgttgacgggctggggcagctttgccgagcaggtcgcggtgcccggctataacgtgctgccgatcccgccgagcatggacttcaacaccgccgccgccttcagcatgacctacggcacctccatgcatgcgctgaaacagcgcgccaatttgcagcccggcgagaccctgctggtgcttggcgcgtccggcggcgtgggcctggctgccgtagagattggcaaggcaatgggcgtccgggtgattgctgctgccagtagcgccgataaactcgcagtggccaaggcggccggcgccgatgagctgatcaactacagcgaagccagtctcaaggatgaggtcaagcgcctgaccgatggcaatggcgccgatgttatctacgacccggtgggtggcgacctgtttgaccaggccattcgttcgatcgcctggaatggccggctgttggtggtgggtttcgccagcgggcgtattcctgaactgccggtgaacctggcgttgctcaagggcgcagcggtggtcggggtgttctggggctcgtttgcccagcgccagccgcaggacaatgcggcgaatttccagcagttgttcacctggtatggcgagggcaagctcaagccgctggtgtcgcaggtgtatccgctggaacaggcggcacaggcgatcaatgacctggggcagcgcaaggcggtgggtaaggtcgtcgtccagacccgctgacatggggtcagtggggagctggcttgcctgcgatagcggtctgacaggtgctgatgtggtgtctgacctagcgccatcgcaggcaagccagctcccacagttgatctgtgttggctccgaggaattcgttacgaccacaacttatctattagcgacatgttcgtaaaagaacatgcaattgctcgcgtttcctgtgtttgcggataagaggcgatgctattttcggtaacgaaactgtaacattcgcatccgcagtcaaaacaagaaatttggagctcttgaatgtttgctttctttcgtcctgccgcacatcaggcgcccctgcctgaagaaaaaatagacagtacctaccgacgactgcgctggcagatcttcgcgggtattttctttggttacgctggctactacctgctgcgtaaaaatttctccctggccatgccttacctgatcgacgagggttacacccgtggcgaactgggcctggcgatgtcggcgattgcgattgcctacggcttgtccaaattcctgatgggcctggtgtccgaccgctccaacccgcgctatttcctgccctttggcctgctggtttcggcgggggtgatgttcattttcggtttcgcaccttgggcaacgtccagcgtgaccatgatgttcattttgctgttcatcaacggctgggcccagggcatgggctggccgccaagtgggcggaccatggtgcattggtggtcgcagaaagaacgcggcggcgtggtctccgtgtggaacgtggcgcataacgtcggcggcggcctgatcggcccgctgttcctgctgggcatggcctggttcaacgactggcacgcggcgttctacgtgccggccaccgtggccctggcggtggcggcgtttgccttcatcaccatgcgcgacactccgcaatcggtgggcctgccgcctatcgagaagtacaagaacgactacccagaaggttacgacgccagccacgaagacgaattcagtgccaaggaaatcttcgtcaagtacgtgctgcgcaacaaaatgctctggtacatcgccttcgccaacgtgtttgtctatctgctgcgctacggcgtactggactgggcgccgacctatttgaaagaagccaagcacttcacggtcgataagtcgtcctgggcgtacttcttctacgagtgggcgggcattccgggcacgctgctgtgcggctggatgtcggacaagatcttccgtggcaaccgcggcctgaccggcatcgtgttcatggccctggtgaccgtggcaaccctggtttactggctcaacccgcccggcaacccgatgatcgacatgattgcgctgttctccatcggcttcctgatctacggcccggtgatgctgatcggcctgcaggcgctggaactggctccgaagaaagccgccggcaccgcagcaggcttcaccggtttgttcggttacctgggcggttcggtagcggccagtgcggccatgggctacacggttgaccatttcggctgggacggcggctttgtactgttgatcagcgcctgcgtactggcgatcgcgttcctgatccctacgctgtggcacaccaacagtgtcagctcggcgcgttaaccgcccaggcaatccttggcacaacgcttgagccgcgcctccaggtttttatctggcatggcgtggctacgcagggcgttcacggtctgctcgacataatcgcgagtcgtaccgtaacgcccgcaagcgctttgcagtacatgattaagcacgatatcgggcaagttgccggcatagctgggcaaatgccgctccagcacgaaccctaacgcctgcacggtactgccatcttgcaatcggcagctgagccagtgcggccggtaagaggggtaaggcatctcgcgttgccacagggcgtaaagcgaggcctccaactggtcctccggcaagcggtaggcaaagccgctgcaggaaccaccgcgatccaacccaaacaccagccccggcagctccggcgtaccgcgatgctcgtgtgaccacaaatacaagccacggtgataaccgtgaacccgtgcacgcacccgctcggtcgacgagcattcagggcgccagatcagcgaaccatacgcaaacagccacaccggcccacccttgtgccgagccatggtggcttgcatcgagctcatcaattgttcgtgagtgagttgcggccccagatcgagccgcggagggtaagccaattgcagaagatcggtttcaatggcggtcatggcgaaaagcggtgcgcctcctgtgtgttaccagttgtaagcgactttaccgtaatagaacgcgccgctgtaaccgtacggcgaaaaagtgctgtaggcgaggttgccgccgctgctggcgaaggcgttaaccttctccgggtacttatcggtgacgttgtcgccacccagggtgaaggtccagttcttcaacttgtaatccgccgacaggtccagcacccaggcggccttgaaggtctgatcgttgaccttgtccgtctgataactggtgaactcaccatagcgcaccaggttagtgtgcagcgcccaattaccgaaggtgaagtcattgcccaggctcagcttgtgctggggcgtggtatcgcccagcaaaccgatacgctcgcggcggtccacccgcaccaggttggcccccaggctgtcgagaatcgcggggttggctttcacgtcggtgactttggtgtggttgtagttgtagcccacggtactgttccagcgaatgccgttatcgagctggtagcgatagttggctaccagatcgacgccatcggtgctggtgtccgtggcgttggtaaagtaacgggccgtggtgtagttgatattgccgacgccattggcttgcaggtaggccaccgtggccgggttgagattgaggttggacgacagactgatgcggtcgcggatgtcgatgcggtacacatcgagcgtgacggtcaggtcatcggccggctcgagcaccaggccgaggctgtagttgcgcgacttttcggccttgaggtcttcggcacccagcaggcgcgcgacctgactgttggccgggaaggtgccggcttcctggatggtgctaccgatcaactgcgatgaggtgtaggcaaaattctgctgggccagggacggcgcacggaaaccgttggagatgctgccgcgcacggccacctggggggtgaagtcgtagcgggccgacagcgagccgctgacgttggaaccaaagtcactgtaatcctcatggcgcacggcagccgaggcgctgagcttttcggtgaagttggtttccaggtccaggtactgcgcccagttatgccgcgtgctggtaccggcatcggcatcgcggaaaccacccaggccggagctgccggtctggtaataggacgcgggctcgcccgcctcgatttcatagccctgatgcaggtactcaccgccgaacgccacagagaccggatacggcagaaagcccacatcgaattcacgggacaggtccaggctgacttgcttctgatcgttgctcagtgtgccgttattgaatttacgcggcgtcgccaggcccagtgaggtgttgatggtttcagtccccagttcgtactggttcttgccgtagttggccgacaagtcgtaatgccagtcgtaggccagcaggccgcgcaagcccaccaccagcgaggtgtcttccaggttgcctttgatcagtggcaggtagccgttggggttgagcgccttgatgttgttggacgcgttgcttgcccggtagaaggctgccgtttcaccgcgccgcttgctgtagccaccgaaggtgtagaactcggcggcatcgttgaaggcatactccgagttgaactggaatttgccttcattggtggccggctcaccttggcggaacacacgctggccgtaagtagtagagccgatgctgccggggcggtagtcgttgccggcgcggttggtgtaatcgttgtcggcgccttcggcagacaggttgataaagccattgtcgcccaatgccaggcccgtattaccgctgacattacgctggatgccgtcaccctttttgtactcgccaaacttgctggaaaccgagccgccatggtcggcgtgcttgaggatcacgttgatcaccccggcgatcgcatcggagccgtaacgggcagaagcgccgtcgcgcagcacctcgatatggtccaccgccgacagcgggatggcattcaagtctgccggagccgaaccgcgcccaaccgcaccgcccagattgacgaaggcactggtatggcgacgcttgccgttgaccagtaccaatacctggtccggcgacaagccgcgcaactgcgccggacgcacgagttcggcgccgtccaccaggcttggtcgggggaagttgatcgacggaatcaggcgcgctaatacggcacccagctcatcggagccggtgctgcgcagggtttcaccggagattacgtcgattggcgacagcgatgcactggcggtgcgctcttgggcgcgggtgccggtgacgatcacggtgtcgagtttaggtgcatcaaccgcagaagtttcgtctgccagaactggattgaatcccacaacggtcagcaaatttgccgacaaaatcgccgtgtatagcgcgtgtttcctgtagctgcccataccgctcccctttgaatcaaaaatagaactgcaatgcgcgaagttcgtacgatcgatccggctggcgggcggtggcggtcagtatctggttatggtcgatgaagtcggtagtccgttgcgatatagcttaaagatattcatcaaccagaataaataccttaaaagaataagcaaaagcataagcacgctcgcccattcgtcaggatccacgcggctaatcccggtactttcagccccggttcagcctgggcgggtgccaagccgtcaaactgacgcgcctataacgacccacttagccgctcatcaaatcgactaccgaggtcgcccatgaaaaaatttcgattgcctggcctgttattgcttgcccaggccaccacagcactggctagcgaaacgccaacggtcactgacgacaaaggcttctggtacgcccagaccagcatctacacccggcactttgcacccgacccgcaacacaacaacaagcaggacttgatcggcctggagcgcaatgaggcgtcgggcctggtgtatggcggggtgacctttcgcaactcgttccgccaacgctcgtactacgcctatgcgggcaagcgctatgacatggccgactatccggtgtatgcgaagttgaccggcgggctgatccagggctatcgcggcgagtatcgcgacaagatcccattgaatcgttttggcgtagcgccagtgatcattccatccgtgggtacccactacggaccggtcgcggcggagttggtgttgctggggttcaatgcagcgatggtgacgacggggttacgattctgagcgaacaccacccaatgtgggagcgggcttgctcgcgaatacggtgggtcagccaactcatccggtgactggtacaacgcattcgcgagcaagcccgctcccacagtttgatggatgtttaaccgagagtttttttactccgctcagggccttggggcgtaggcaaacacgtcagcgcgcatccggtgagcatccataccggcgtcgaccaatgcatccaaggtgccataaatcatcgccggtgagccgctggcgtagacatgtaccgtgttgaggtcggcaatgtcttcgcacactacctcatgcagcaaaccgcagcgcccttcccagccacacaggtcgctgaccactttgtgcaggaacagattgggcaattgcagccactgatcccagtgctcgatctggtagaaatcttccgggcgccgtacgccccaatacaggtgcaccgggtgcttgaagcccgaagcgcggcagtgctcgatcaggctgtgcatctgcgccataccggtaccggcggccatcagcaccagcggcccgtccggcaactcggccaggtgggtgtcaccgaacggcagttccacacgagccatctggttgcgctgcaattgttcgatcaggttgcgcgcactgtcttcgcgcaccagcacatgcagctccaactcacgcccggcatggggcgcagaagccagggaaaacgccgacttttcgccgttctcccgttcgagcatcaagtattgcccggcgtggtaacgcaccgccttaccggccggggcgcgcaggcgcacacgccagacatcgccgccgacttccacgcactcgatcaattggcatgacaatttgcgcaacggcaactctcctggcgccagtacgccatcccacaacacaatgcagtcttccaggggctcggcgatgcaggtgtagaactcaccatgatcgcgcacttccccggcttggcgtacccggccctccaccagcaacgccgcgcagacatggcacacgccattgcgacaggcctgagggcactcatagcccaggcgacgggcgccctcgaggattcgctcgccaggggccagttccagcacagcaccggaaggttgcagggttacacgcatcaatctattcccaattctttccagatcgcatcgacccgcgccgtgacggcttcatccttgacgatcacccggccccactcacgcgtggtttcgcccggccacttatgcgtggcatccaggcccatcttcgagccaaggcccgataccggcgacgcgaagtcgaggtagtcgatgggcgtgttgtcgatcatcaccgtgtcgcgcttggggtccatgcgcgtggtgatggcccagatcacgtcgttccagtcccgggcattgatgtcgtcgtcggtgacaataacgaacttggtgtacatgaactgtcgcaaaaacgaccacacaccgagcattacccgcttggcatgccccggatacgacttcttcatggtcacgatggccatgcggtacgaacagccctcgggcggcaggtagaagtcggtgatttccgggaattgcttttgcaggatcggcacgaacacttcgttgagcgcaacgccgaggatggccggctcatcgggcggacggcctgtgtaggtactgtggtagatcggcttgacccggtgggtgatgcgctcgacggtgaacaccgggaagctgtcgacttcgttgtagtaaccggtgtggtcgccgtacgggccttcatcggccatttcacctgggtgaatcacgccttcaagaatgatttcggcggtggctggcacttgcaggtcgttaccgcggcacttcaccagctccgtgcgattaccgcgcaacaagccggcgaaggcgtactcggagaggctgtcaggtacgggtgtcactgcgccgaggatggtcgcagggtcagcacccagggcgacggaaaccgggaacggcttgccgggatgcttctcgcaccactcgcggaagtcgagggcgccgccgcggtggctcagccagcgcatgatcactttgttacggccaatgacttgctgacggtagataccgaggttctggcggtccttgttcgggcccttggtgacagtcaggccccaggtgatcaacgggccgacgtcgccgggccagcaggtttgcaccgggagcatggccaggtcgacatcatcgccttcaatgaccacttcctggcacaccgcgtccttgaccaccttgggggccatggcgatgatcttgcggaagatcggcagtttggaccaggcgtccttcaagcccttgggcggctcgggctccttgagaaaggccagcagcttgccgatctcacgcagctcgctgacggactcggcgcccatgccaaaggccacgcgctcgggagtaccgaacaggttgcccagcaccgggatatcaaagccggtcgggttttcgaacaacagcgccgggcccttgttgcgcaaggtacggtcgcaaatctcagtcatttccagcaccggagaaatcggcatctggatacgtttcaactctccgcgctgctcaagttgctgcacgaaatcccgaagatccttgaatttcattaaccatgccacccgtaaaataggcgtacatcctacctgctctgagggcggctggcagcttaattggccgtcaatccgcgtgattgcaacgaactgaacaacggctccaggaaggcttcgatgtgtcgcgcgccgacgtctgaaagatggttatcgtcggtatacagcgcgcggccattgagttcgacccggcacagcccatcggcgccgcacagcaatggcgcggggtccagcaccgcgacaccgctgtcggcagccgccaattcatcaaacaagtgcgtgataaaggcctggcgcttcacatgctcggccacggccagcccttcaccgtccacgggccggttcatcatggccaggcggctgagacggtaaggcacgatgatttcctgcagcggcacttccttgaccagccagaccttgtgcccggcagcgcgcaagccctggatgcgctcgcgcaggccctgggcaaagcgttgttcggcgacggcacgcacatactggccggtgccagggtccttgagcgcatgctccttgtcaccggacatttgcccatacacatacaggctccagcgggcggccaacaccacatcgctgaacgtctgctcagccatggccttctcgacgcgacggttgaaatgcgcgcagcgggcaatattttccaggccatcgaggggaatacagccggcaaaactggcttcgaccaggctgatatcgtggcgatcagcgccctctttgagtgccggtatcagcgcggtggcgtggctgtcaccccataccaacgctgaaaccgattggcctttggggccgaaatggcagaacaagcgttcatcgggcgtatctttgtcggccatgcacgccagcaggtccgggctccacttcttggcttgggcaaaacgcaacgcctgttcggacaagcgcgaaggcacgccgtcagcttcgcgtatcgcaaggccagtgaaacccagccccagaatgccgaccatggctgacgccagaatcgccttacgcgaagccagcaaacgtttttcccgaaacggcgtttccacgaaacgccaggacagatagcccagcaccagcgaaagcagcatcagccccgccagttccagcgcgctcaagccatccaccgcggcatagttggcgtacacgaataccggccagtgccagaggtaccaggaataagagatcagcccgatgcccaccatgatccgcgtgcccaacaggcgagcgacccaggtctgttgctgaccgttggcccagatcaacccgaccacacccagcacaggcaacaacgcggtcgcgcctgggaacggcgttttcgcgtcgtaacccaatacagcgatgaggatcaatgccagggaagccaggctgaccccttgagccaaggccggcgaggcgcgccattcacgcttgggctgcaccgccagcatcgcaccggccagtagttcccaggcccgcaggtgcaacaggaagaaagctttctgcggctcatgctgaaccgcccagacgctcatgccaaacgacaccagcagcaccgcgaacaatgccaggcgccagtgcttcaagcgactggagagcaaggtcagcagtaacgggaagaaaatatagaactgctcttctactgcgagcgaccaggtatgcagcaatggcttgatgtcggatgaggcatcaaagtagccgtgctggcgtgaaaacagcaggttcgaggtaaaggtcacctgatagtgcgcagaccgccccaactcttcatagtccttgggcgccaacagaaaccaacccactgccagcgtcgccgcgatcatcacaaacagggccggcaagatacgccgggcgcggcgggcccagaagtcgatgaagctgaagcggccggcctgacgctcacgccaaataattgacgtgatcagaaagccggaaatgacgaaaaacacgtcaacgccaacaaaaccgccagtaatgccaggtacaccaaagtgaaacaacacgactgcaaggacagcgatggcacgcaggccgtcgatgtctctgcggtaagcaagggtggtcataagaatgtggtcagtctgcgacgaaagggatgagcgaagtcacgcgtcaatttttgttacttaacggatacttatgccacaaaaatcgcagaatctcgacgcaaaaaaaatggcgccccattaaggacgccatttttttggacctgaaacgctgtattacttgcgtttcatcgacaggaagaactcgtcgttggtcttggtggttttcagcttgtcgatcagaaactcgatggccgcaacttcgtccatcgggtgcagcagcttgcgcaggatccacatacgctgcagttcgtcgtctgcggtcagcaactcttcgcggcgagtgccggagcggttgatgttgatcgcagggaacacacgcttttcagcgatgcgacggtccaaaggcagttccatgttgccggtacccttgaactcttcgtagatcacttcgtccatcttcgagccggtttcaaccagcgcggtggcgataatggtcagcgagccgccttcttcgatgttgcgcgcagcgccgaagaaacgcttcggtttctccagggcgtgggcatcgacaccaccggtcagcaccttgccggagctcgggatcacggtgttgtaggcacgggccagacgggtgatggagtcgagcaggatcaccacgtctttcttgtgctcgaccaggcgcttggccttttcgatcaccatttccgcaacctgcacgtggcgggttggcggctcatcgaacgtcgaggcaaccacttcgccgcgcacggtgcgctgcatttcggtcacttcttccggacgctcatcgatcaacagcacgatcagatgaacttcagggttgttacgtgcaatgttcgcggcgatgttctgcagcatgatggtcttaccggctttcggcggtgcgacgatcaggccacgctggcctttgccgattggagcgcagaggtcgatcacacggccggtcaagtcttcggtggagccgttaccggcttccatcttcatgcgcacagtcgggaacagcggagtcaggttctcgaagagaatcttgtttttcgcgttctcggggcgatcgaagttgatcgtgtcgaccttgagcagggcgaagtaacgctcgccttccttcggaggacggatcttgccaacgatggtgtcaccggtgcgcaagttgaagcgacggatctggctcggcgagacgtagatatcgtctgggccggcgagataggacgcgtctgcagagcggaggaagccgaagccgtcctggagaatctccagcacgccatcaccggagatttcctcgccgcttttcgcgtgcttcttgagcagggagaaaatcacgtcctgcttgcgcgaacgggccatattttctatgcccatttcttcggccagttggagcaggtcggtaatcggcttttgcttgagttcagtcagattcatataggaatgacgtaatcatttatggaggggggaaattaagcttttggcttaatgaggccgcgccgcagagaaggcgacaggatcgcgtactaatcgaaaaggaatgcgtcggcgacggcttgcagggggcagtggagaaaccactgcggggccgaatgtaccacctggatttcggagcgtctagccctgtttcacgaaaaagccccgcaatttgcggggcttttttgacgacgcttagatgctcgcgtcgaggaaagcttgcagctgggacttcgacagcgcgcccactttagtcgcttcgacgttgccgttcttgaacagcatcagggtcgggataccacgcacaccatgcttggccggggtctcctggttctcgtcgatgttcagcttggcaatggtcagcttgcctgcataggtggttgcaatgtcgtccaggaccggagcgatcattttgcaagggccgcaccattcagcccagtagtcaaccagcaccgggccgtcagccttgaggacttcggcttcaaaggtcgcgtcggtgacgtgcttgataagatcgctgctcatggatgtctccggattgtaagcaaaaaaaacgttgcccatcatagccgcccttcccctgttcaggaagccgcgtctgattgagtcttgctatgaacttgaatgagtgtgggtatgaccccgtcacggcgtagcgggcgtcacgaacgcaatgcccgtgcgcaacgctgcattacgtatatgttcctgcatggttttctgcgccgccgtactgctgcggcgggccagggcgcgcaggattctgcgatgttcctgccaggtttccatggcccgttccggccggatgaacggtagcttctgactttccagaaacacctcggcactggcgctgaggatgctcaccatggcctggttaccgctggccagcagaatgcgctggtgaaactcgaagtccaggcgggcagccgcttcgaaatcgcccgccttgagcactttgcgcatggcttgaacattgtcttgcaggctgtccaatgcatcgagggttagtgtcaccgctgccaagcccgccgcaaacccctccaaggcgtagcgcaactggaagatatccggcggcgtggcctgcgccgcaaagggccaggcgaaccccggcgcctcttgcacgtcctgcacgaacacgcccttgcccggctgcacgctgaccacgcccaaagcgctgagggacgacagcgcctcacgcaacgacgcccggctcacccccaattgcagggccaggtcgcgctgggacggcaacgcgtcgcccggcccgaagccctgctccttgatcagtttgcggatggcctgcaaggccgcttccggtacggcttgggcaatggaattcataaaaagctcagggttcccgatagcgtgtgtgaccgttgtaaaactattcagggccggctgcaagccacgccccaaaggggctcgccgctttttgccgacgctcgaaaagggtgcgaaatccctggccactgttcagaccagtaagacctgtacacctcaacaaccatcagccttgcagacgatccgagcagtgctggcatgggctgtgcactgggcaaactcagaaaattccttcgccattttcggagagttgccatgaccaagcgctacagcgccctgctcactgccctgtttgccagcctgatgctgagccaggcacccgcccaggcgaatggtctggatgacatcgtcgcccggggcaccctgaaggttgccgtgccccaggacttcccaccgtttggttcggtgggtccggacatgcaaccccggggcctggacatcgacaccgccaagttgctggccgaccaactcaaggtcaagctggaactgaccccggtgaacagcaccaaccgcatcccgttcctcaccaccggcaaagtcgatctggttatttccagcctgggcaagaatcccgagcgcgcaaaggtcatcgacttctccaacgcctacgcgccgttctaccttgccgtgtttgggccgcctgacgccgccatcgtcagcctcgacgacctcaagggcaagaccatcagcgtaacccgtggcgccatcgaggacatcgagctgaccgcggtagcgcccaaggaagccacgatcaagcgctttgaagacaacaattccaccatcgccgcctacctggccggccaagtggacctgatcgccagcggcaacgtggtcatggtggccatcagcgaacgcaaccccaaacgcgtaccggcactgaaggtgaaactcaaggactcgccggtgtacgtgggcgtgaacaagaacgagccggcgctgttggaaaaggtcaaccagatcctggtggcagccaaggctgacggcagccttgggaaaaacgcgatgcagtggctcaaagaaccgctgcctgccgatctctgacgcggagctcaaagatggcctatcaattcgactttgtgccggtgctggccaataccgacctgctgctgcgcggagcgctgttcacccttgagctgacggctattggcgccgtcctcggagtggccctgggcaccgtcggtgccgtggtacgggcgtggaagatccagccgtttgcgtggatttttggggtgtatgtcgagttgatccgcaacacgccgttcctcgtgcaactgttctttattttcttcggcctgccgtccctggggttgaaaatcaccgagtggcaagccgccgtgctggcgatggtgatcaacctgggggcgtactccaccgagatcatccgtgcgggcatccaggccatcccacgcgggcaactggaggcggccgcggcgctggcaatgacgcgcttcgaggcgttccgccatgtggtgctgctgccggccctgggcaaggtgtggccggccctgagcagccagatcatcatcgtgatgctcggttcggcggtgtgttcgcagatcgcgactgaagagttgagctttgccgccaactttatccagtcgcgtaatttccgcgcctttgaaacctatgccctgaccaccctggtgtacctgtgcatggcgctgatgattcgccaattgctcaactggatcggccgacggtttgtcatgaggaacagccgatgagtgatttttcgttctgggacatcgtgcgcaacctgctgaccggcctgcaatggacgctgctgctgtcattggtggcgtttgtgggcggcggcctgatcggcttactggtgatgaccctgcgtatcagccgcaaagcgttcccacgcaatatggcccgcacctatatcgaactgttccagggcacgccgttgctgatgcagctgttcctggtatttttcggcgttgccctgcttggcgtggacatatcgccctggctggcagcggcgattgccttgaccctgtttaccagcgcctacctggcagaaatatggcgcggctgcgtcgactccattgcccacggccaatgggaagcctcggccagcctggccctcaacccgtttgaacaactgcgctatgtgatcttgcctcaggcgttgcgtattgctgtcgcgccgacggtgggcttctcggtgcaggtggtcaaaggcaccgccgtaacctcgatcatcggcttcaccgaactgaccaagacaggcggcatgctcgccaacgccacctttgagcccttcatggtctacggcctggtggccctcggttactttttgctctgttaccccttgtccctcagtgcgcgctacctggaaaggagactgcatgcctctgcttagaatttctgccctgcataagtattacggcgatcaccacgtactcaagggcatcgacctgacggtggacgaaggccaggtggtggcgatcatcggccgcagcggctcgggcaagtccaccttgctgcgcaccctcaatggcctggagtcgatcaacgacggcgtcatcgaagtcgatggcgaatacctcgacgccgcccgcgccgacctgcgcagcctgcggcagaaggtcggcatggtgttccagcaattcaacctgttcccgcacctgaccgtgggcgagaacgtgatgctggcgccgcaagtggtgcagaaagtgtccaaggccaaggccgccgaattggccaggcagatgctggaccgggtcgggctgggcgaaaaattcgacgcctttcccgatcgtttgtccggcggccagcaacagcgcgtcgccattgcccgcgccctggccatgtcgcccaaggtgttgctgtgcgatgagatcacctcggccctggaccccgaactggtcaatgaagtgctgagcgtggtgcgccaactggcccaggacggcatgaccctgatcatggtgactcacgaaatgcgttttgcccgtgaggtcggcgacaagctggtgttcatgcaccagggcaaggtgcatgaaaccggtgacccgaaggtgttgttcgccaacccgcaaacagttgagctcgccaacttcattggctcggtggaacagcctggctgatcagttcgaaactgcccagcccttcaaggttggcctccccgcgtaccatcaacgcctcgaagggcagttcggtgtcgagatcgacctgggcggtgagtcgccgccctgccaccggcaaacctgcggcgcgcgcgaccaaggcctggccgggtaataactggcctctggccgactcgtcaggcgcttgagcagacacccagccgacagctcgcccgtcgacctgggcatgcttgagacgcaagcgaaaacgcccctcacgaccaaaccgaaacccttgcccatcggcaggcgctgcgacaaagcgcagggccattaccgccggttcaacacagagcacagacaggttgaacgtgcgagtggccagcaccacagcggcgttttcgaccactgcatcccggcgtattgcgccatagtcgatgcgcggcgggctcagcgaaagccgacaattttcagcttgcgcatcgagcgttgccagcagcacgcatgagagcgccaagggcaggctggtacgcttaaccaccctggcataccgccgatgcagcttcatagaatttgtcattgtcaggcttggcctctgggtcaatgtgcaacaggcaagtggaagagtccggcaatgaaaccctcaggttttgcagctcggaaacgtcgttgagaaaaatcatgccctcgcccaccacgctggtgaggaagcggttgcccttgccgaacaccgaggcgccctgaggcaatggccggccgtgctgatcgttggcggtcaccagcatccggcgcactttcaccacgtcaaaatccacgtgattgaatgagcctcggcccgccgcaatgacctgggtgccgtttttcaggtctacctgcttgggcaacgaaggggtctgtacctggacgcggctgttggtgtaggccggcaagccggcgatcaccgcctggccgctgaagtcggtccataccgggccttgtggcgtctcgactttcgccgagccgatatcgccgaccgagacgatgccgaacgtgtcctgcacgctgtacggcgaaaaggtcagcccgccttcgtgagccaccacgcccccctgcaactggcctgtgtagctgctacccaacgggtcgtggctgacgcccaggcccactcgtgcatagcgtggcaacacgtccacttgcccacgcaacgattgctcccgggcccgcatgtcacgctccaccgctacttcgtagttcacatactcgttgacccgttcgctcagtgcagtaccggcagtaaattgctccccacggcggctggtgtagctgctcacacggcgatcgccgcctagcggcacactgacctgcaaccgcagggacacgtcgttatctaccgcacgatcacgccggctaccggcatagttggcgtcttggcgagcccgcgagccgcccacttgagagtcagcgatcagcgccacatcggcccggccaaacgacttgttccatgaggcaaacacatgctcgctggtttgcccgccaaattgcgcgctgtgggtgtaattcaaagaaaatacgcccagcgtgggttcggcccagctcacgcctgcggtgtactggtttttgaagtacgaattgagatcatcggctctgagcggctggcccacctgcgtgacttcgcgataaccacgcgtctgggtggtggcgctgaggttgacgtcgatattggccccgacggggctgctcagcgacaggctgctgcgtgagccggacacggccttgtggctgtcccgggacaggttgtggcgtgcgttgacagaaacccgttggaaaaacacgctgctcagggtccctcctgccgcccaatagtcatcggtgctcaacaagccaaaacccgcagacgaatgactccccagcccccaggtgccactgcccatggcgatcaccggggatggcccttcctcacccgccgttctgcgcagttcgcccaccgataaatagtaaccaggcgccgccggggcagcccccgcgaatgatgccgccggtaccacgaaactgcgcttggcgccccgcacatcaatcacgctgacctcaaggtcgctggtggcgttgagcaggggcaagcccgtcagccggaacggtccttcaggcaccaacgtactgtggaccaacacaccggactggcgtatctcgacccgcgattggctttgggccaacccctcgaccactgcgatattgccgcctgcgggtgtcctggactgcccatcgggggaaaactgcacgccagacagttggatcccgccaaacagcgggttattactggagagctggcctgcctggaacgtcgaacgcaacccggcgatatcccgctgggcataagcgtgcaagtgttcggtacgggtctggccgttgtccgacacatagaactggcggctgcggacaatccaatcgtcgaggttgaaacccgcttcggtataagccgacacgaaccggctgggcccgctgcgcgaatggctgtcgtaacccagcacgtcatagttgaacaacgctgccgcgccgccctgggaaaaatccccgctttgccactcgggttcgcgcaaagcctgggtcggcaccaccagcaccacttcgtcggtaccgggacgcaggcgcaccatcgtggcgggaaatgcgccgagaaaatcatgacaggcctggcctggccaggcacctggctgcaggattgcgccaggtttaaccagcccggctttctccagtaaaccaggggtgaaacataattccccctgtggaccaaactgagcatccaccagcccaagcgggttgccattgacccgtaaccccaccacctggacaccttcgcgaaagcgcgccgcactgcgaaagtaatcggcaaccttggggtctatgccgtgggttgtcagggccgccaggtcaaacccttccccgagttccagcgcggtcgcgataccaggtaaactccagagcgccgcaaaactgatgaacaacgtggatcgaccgggccaggaattacccggaatgccacgcctggagcgaatcatcatgaaccgatcaaccctcatcggtgatgaccggcgctcggtagttgtctaccgaaaacccgtagaccgtggcgggctggatctctacttgagccacattgcccaacggaccttcgcccttcgccaccaatgcctcacctggcaaaatgtaagtgcgcggcaatgtcgccagcgtgccttgtggcagcagttgcacatctggcgccaggcgcactacataggcgctgtcgttgtggacgctgagccggtccccgacgcgcttccacgtcaacaactcccagggcgtgtggtgccgtggcaggccttgggggtgcaggatcagcggcaaattctgccgcagggtgatgccgatggtcgcaccaccggcagcacgcgcttgggggatgccctcgaacgacacgcgcttgagccgctgggtcttgagcggctgtttcaaggtgctgataaagcgcacaagctgcgtatcccccgcctccacacgggtgacaggcggtgtgacaatcagtagcggctccaggtcttcaggcacattctcaacaacggaatgcaacagtgccggccccgcatcggtgttcttgatactcaaggtggcttcgccgtcttcctcataaagcaccaccactgttgtttccggcaacataccgtcggcggcggcaacagcactgaaaaaaagatgccacagcagcgcacaacttattaaaaaaccacgcactcggtattcccctcaactcatgccgttgacgattggcaatcgcgcagccaaagaaaaacagccaataagaaagggttagtttcttgatcggctgctttcagttatttagatgtaactcaatacaagcgtggcgcgcccatcaatggaaatgtcacggcttaaatccagatcccgagccctgttgatcaccgctttcaccgcgagcgtaccggtcaattggctgatagcagcaggggtaatcgtcaccccattacgccaggagtactgattgggcgactgggccactttgccatcgctgttgtaccaggccccaaggccagtgcgcatgatcggaaacagcgtcgtgccggaagacctgaggtccctgagagtgaccgaatagccaccggtacgccgggcgcccaccatacccaacccatagttctgtgcttcggtgaagcccgcgccgaggatgcccgtcaccttgctgcccgcttgcaggtcggtaaacgtgagcccgaacctggcaggcgtggtgccgcaattgatcaccagcgaagtggtcctctcttcgcgcgggttaaacgctgtttgggacaattcgcccgagcgaatcgtgccgtagtcgatgatgccactgcccgccaggctgagattgcaggcagccggtgtaatcgtgcccctgacgaccaactgcgcactggtggttgcctgggcattgagggtcgcaaccaggcacgccataccgacggttaatccaataatctttttcatgctcttcctgtcatttgaaattaacaggcgctctttatttcggtttttgcgactccgtcgctcaacgctttatcttccgtaacacaaaactataaataaataacacccaggcagaattgccgaatgacagtctggcgccttggtgcttggcaaaaaaatcagacatcgcggtatttactgtgggctctattaaattaggcaacggctttaatctatcagcaaagtagtcctgtcgctgaaatggcatgatctatgatcctgatcactgtaagcaatgtcatacgccacttacgacgatatacagttaaaacgtcttacagtatcggagcacctattcgcttaaagcttgcgaagctgccctacacttcccagagatttacctacagacagcattggcccaattaccgaagcacaacgcgttggcgtcagcggtcgatcgtggcacgatggcaaggttatcgaccgagatccccaaaccatgccgcaatcccaagccaagaatctgtccttgatcgccgccatcgacctgggctccaacagctttcatatggtcgtggccaaggcccagaacggcgagatccgcatccttgagcggctcggcgagaaagtgcaactggccgccgggatcgacgacgagcgcaagctcaatgaagaatccatgcagcgcggcctcgattgcctcaagcgttttgcgcaactgatcaacggcatgccccctggcgcggtgcgtatcgttggcaccaacgccttgcgcgaggcccgcaaccgcaacgaattcatccatcgcgccgaggaaatcctcgggcatccggtggaggtcatctcgggccgtgaagaggcgcgcctgatctacctcggcgtgtcccataccctggccgatacgcccggcaaacgcctggtggccgacatcggcggcggtagtaccgagttcatcatcggccagcgtttcgaaccactgctgcgtgaaagcctgcagatggggtgcgtgagtttcacccagcgttatttcaaggatggcaagatcaccccggcgcgttatgcccaggcctacaccgcagcgcgcctggaaatcatgagcatcgaacatgccctgcaccgcctgacctgggatgaagccatcggctcgtccggcaccatccgcgccattggcctggccttgaaagccggcggccatggcaccggcgaggtgaacgccgaaggcctggcgtggctcaagcgcaagctgttcaagctgggggatgcagagaaaatcgacttcgacggcatcaagcccgaccgccgcgccattttccctgcgggcctggcaattctcgaagccatcttcgacgccctcgaactgcaacgcatggaccactgtgacggcgccctgcgcgaaggtgtgctctacgacctgctgggccgtcatcaccatgaagacgtgcgcgagcgcaccctcagctcgctgatggagcgttaccacgtcgacctggagcaagccgcccgtgtggagcgcaaagccttgcacgcctttgaccaggtggccgaggactgggacctggaagacggcgtctggcgcgagctattgggctgggcagccaaggtgcacgaagtgggcctggacatcgcccactaccattaccacaagcacggcgcctacctgatcgaacactcggacctggccggtttctcacgggaagaccagcaaatgctcgcgctgttggtgcgcggtcatcgtcgcaatattcccaaggacaagtttgccgagttcggtaaagacggcatcaagctgatccgcctgtgtgcgctgctgcgctttgcaatcctgttccaccacatccgtggcacccaggaaatgccccaggtcaaactgcacgccgatggcgacagcctggaagtgatgttccccaaaggctggctggatgaaaaccagctgacccaggccgacttcgcccaggaagccgaatggctgacgcgggtggggttcagcctgaacctgcgctaagcaactctaaaagcattctgcaaaacaaatgtgggagcgggcttgcccgcgatgacggagtgtcagccaatgcatctttggctgacctaccgctatcgcgggcaagcccgctcccactttttgaactgcgttgggttttagttcaccgtcagaatcgggctacccaacttctccaacaacgtcgcctgcgcgctgcgcgggttctggttgccggtcggagtgttacgcacgtagcgcccatccgactgcaggctccagctatgggtgttgtcggtcaggtagctttccagctccttcttgacccgcatgatcaacttcttgccttccaccgggaagcaggtctccacacgcttgtcgaggttgcgctccatccagtcggcactggagaggaacatctgctcttcgccaccgttaaggaagtagaacacgcgggtgtgctccaggaagcggccaatgatcgagcgcacgtggatgttatgcgacacgcccacaatgccggggcgcaggcagcacatgccacgcaccaccaggtcgatacgcacaccggactggctggccttgtacaacgcgcggatgatcttcgggtcggtcagcgagttgaacttggcgatgatgtgcgccggtttgccgtcgagggcaaactgggtctcgcgggcaatcatgtcgagcatgcccttcttgagcgtgaatggcgcgtgcagcagtttcttcatgcgcagggtcttgcccatgccgatcaactggctgaacaacttgccgacgtcttcgcacagcgcgtcgtcggacgtcagcaagctgtagtcggtgtagagcttggcgttgccggcgtgatagttgccggtacccaagtgggcgtagcgtacgatctcaccggcttcacggcgcaggatcagcatcatcttggcgtgggtcttgaagccgaccacgccgtagatcaccaccgcaccggccgcttgcagacggctggccagttgcaggttggactcttcgtcaaaacgcgcacgcagctcgatcaccgcagtgacttccttgccgttacgcgccgcgtctaccagcgcatcgacgatttccgagttggcgccgctgcggtacagggtctggcgcacggccaggacatgcgggtctttggcggcctggcgcaacaggtcgaccaccggggtgaaggactcgaaggggtgcagcagcaggatgtcctgcttgctcaccacgctgaagatgttctcgctgttttgcaaaagtttcgggatctgcggggtgaacggcttgtattgcagctccgggtggctgtccaagccggtgatgctgaacaggcgcgtcaggttcacggggccgttgacctggtacagctcggattcggccaggttgaactgcttgagcaggtagtccgacagatgtttggggcaagtgtccgccacttccaggcgcaccgcgtcgccgtagcgccgcgagaacagctcgccgcgcagggcacgggccaagtcttcgacgtcttcggagtccagcgccaggtcggcgttacgggtcaggcggaactggtagcagcccttgaccttcatgccctggaacaggtcatcagcgtgcgcgtggatcatcgacgacaggaatacatagttgtcgcccgcgccacccacctcctccggtaccttgatgatccgaggcaacaagcgtggcgccgggatgatcgccaggcccgaatcgcggccgaaggcgtcgataccttcaagctcgacgataaagttgaggctcttgttcaccagcaaggggaacgggtgcgtcggatcgaggccgataggcgtgatgatcggcgaaatttcgtcccggaagtaacggcgcacccaggtcttgatcttggcggtccagtgacgacgacgaatgaagcggacctgatgcttttccagttcaggcagcaggatgtcgttgaggatcgcgtactggcggtccacatggccatgcaccagctcactgatgcgcgccagggcctgatgcggttgcaggccgtcggcaccggcttgttcacgggcgaaggtgatctgcttcttgaggccggcaacacggatctcgaagaactcatccaggttgctggagaagatcagcaggaatttcagccgctccagcaaggggtaggactcatccagcgcctgctcgagcacgcggatgttgaattgcagttgtgacagctcgcggtggatgtacaggctgctgtcatccaggttggtgaccacgggcgctggcgccggcgcaggtgcttcggctaccaccgcaggcggtgcaggctccagctccggcggggtctcggcgacttgttcaaccaccgggtgagcgtcttttacggcaacttctgagagtccttcggtattcatcgagtgttcctgtgagggctattgttgctctctaagcaattgggcggcgcgggcggcgaagtaggtcagaatgccatcagcgccggcacgtttaaaggcagtcagggattcgaggatcaccccttcactcaaccaaccattctggattgccgccatgtgcatggcgtattcaccgctgacctgatagacaaaggtcggcactttgaattcctctttgacccggtaaagaatgtccaggtagggcatccccggcttgaccatcaccatatcggcgccttcggccaagtcggcagccacttcgtgcagggcctctaggctgttggccgggtccatctggtacgaggccttgttggccttgcccaggttcagcgccgagcctaccgcatcgcggaatgggccgtagtaggcgctggcgtatttggccgagtaggccatgattcgtacattgacgtggccagccagctcaagggcttcgcggatcgcctggatgcgtccgtccatcatgtccgacggcgcaaccacctgggcgcctgccgcagcgtgggacaacgcctgcttgaccagtgcatcgacggtgatgtcgttctgaacataaccgtcttcgtcaagaatgccatcctggccgtgggtggtgaatgggtccagggccacgtcggtgatcacccccagttccgggaagcgctcgcgcagggcacgggtggcacgctgggcgatcccatcggggttccaggcttcggcggcgtccagagacttgagttcggccggggtcactggaaacagcgccaacgccggaatgcccaactcgacccaattcgccgcttcttcaagcaacaaatcaatggtcagacgctccacacccggcatcgacgccaccgcttcccgacgattttcaccgtcaagcacgaaaaccggcaggatcagatcattcgtggtcagtacattttcacgtaccaggcgacgagaaaaatcatcacgacgattgcgacgcagacgggtggcggggaacaggcgattggcaggggtaaagctcacgacagactcctgagcccgtgtttacgggcgagcgttgcagttataagcggccattatgacgaatgaatgacagttgtgcttatcgacgcgacctgtagtcccattcgtcatttgcgtaggaattgttcacttcgtgacacatctcgatactttcatgaatcttcgtgaaggcgtaggctgcgcgttcatttcgccagcaccctagaccatgcttcaacaatttctgcatgacttcggctactttgccctctttctcggcacgttcttcgaaggcgagaccatccttgtactcgcaggcttcctggcgttccgtggctacatggatatcaacctggtggtggtcgttgccttttttggcagctacgccggcgaccagctctggtactacatggggcgcaagcacggccgcaagttgctggcgcgcaagccgcgctggcaattgatgggcgacaaggcactggaacatatccgcaagcatccggatatctgggtattgagtttccgcttcgtctacggcttgcgcacggtgatgcccgtggcgattggcttgtctggctacccaccgctgcgctacctggttctcaacggtattggcgcggcgatctgggcggcggcactgggggcggcggcctaccacttcggcgcggtgctggaaggcatgcttggcagcgtcaagaaatacgagctgtgggtactgggcgccttgctggtgctgggctttggcctgtggttgcgacgccgcttcaagaatgcccgcatcgcccgccaagcgtgtgccgaggccaaggctcggctggccaacgagccagccccggtgcaaacgcctaagacgccaaccgagtaagccggcttctgcaacagtagaggccgatgatgctgagcaggctgtagctcgccaggcccaaccagcccaggttgctggcgggccacaaccccaccagcggcgccagccataccaacggcacattcagcgccaggcgtgccagctcggccttcagtgcccatgagcgattctccagcgccacgcccaaggtaaacagccccagcgccatcgtgccccaaccgagggccagcgccgacgtgggcaagccctcaccgaaattcatcaaatagctgccaaaccccacgtaagccgcaaactgcaaggcgatgtagacctgttggctcacgtccagcggcacctcgaatttgcggaactggctcaggtccggcttggccagcgggtactgggcattgacgtccgccgggcgccagccggtgcgcatgaaccagatgcgcagcttgtcccaccaacgttcagtacgccgggcgtcactccatagctgcgcataaaactgcaggttggcccacagcgggttccagctggccaggggtgtggtcacgccgaaaatcaccggctcgttatcgtcttcctcctggaaggtgccgaacagccggtcccaaataatgaacaccccgccgtagttgcgatccatgtagagagcgttctgtgcatggtgggcccgatgattggacggcgtgacgaacagccattcgacccagccgagcttgggaacatgacgtgtatggacccagaattgatacagcaggttgagcgaggccacactgataaacaccaccagcggcacgccggccaccgccagcggcaggtagaagatccaactcagcaggaagccggtgctggtctggcgcaaggcggtgctgaggttgtagtcctcgctctggtgatgcaccgaatgcgcggcccacaggatgttgcgctcatggcccattcggtgcagccagtagtagcaaaagtcatagaacacaaaggcgaatacccaggtccagacgttttcggctggcaactcgaacagcgccaggtgcttgagggcgaacgcataggtcagcaggcccacgcccttggtgagcaagccggtagtggtggacagcacgccggtgctgaggctgttgatggcatctgccactcggtagttgcgcacgccacgccaacggtcggccaacaactccaccacaatcagggcaataaaaaacggtactgcataaggcacaaagtccatgggcgagtccggtctatttttgttacatcaagattaggtgcagcgacgtgagatcccattggcaacaggttacaaattagtagacatttaacgccatgaatcaggagaaatgcccatgagcaaaaagattgcagtgatcctttccggctgtggcgtgtacgacggcgcagagatccatgaaagcgtgatcaccctgctgcgcctggaccagcgcggcgctcaagtggaatgctttgcacccgacgttgcgcagttgcacgtgatcaaccacctcacgggcgaagaaatgcccgagtcgcgcaatgtgctggtggaatctgcgcgcatcgcccgcggcgccgtgaaggatattggccaagccaatgccgcagactttgacgcgctgatcgtgccgggcggttttggcgcggccaagaacctgtcgaactttgccgtggaaggcgccggctgcagcatcaacccgcaggtgctggcgctggctgaagcctttgccgaagcgggcaagccggtggggttgatctgcatctcgccggccctggccgccaagatctacggccctggcgtgacctgcaccatcggtaacgatgccgacacagcggcagccctggacaagatgggcgccacccacatcgaatgcacggtagaggacattgtcgaggacccggcgcgcaagctggtgagtacgccggcctatatgctgggcaagaacatcagcgaggtggcgtcaggcatcaacaagcttgtggatcgggtgttggagttgacccacgagaacgactgacgccctctttctgtaggagcgagcttgctcgcgaagaacctgagagcgccgcgttcatccagagtgcccgcgttatcgttgacgtttttcgcgagcaagctcgctcctacagaggcttcatcaagcgggtgaggatacggtccagtgcattggcaaacgcctgcttgtccttttcgctgtggggcggtgggccgccgcccatctggccttgctcgcgcaggtcggtaaacaggttacgcaccgccaacctctcgctcatgttcgctgggctgaattccttgccacgcgggtcaagggccgtcacgcccttcttcaccaggcggtcggccaagggcacgtcgctgcaaatcaccagttcgccgggcacggcgtgctccaccaggtaatcatcggcggcatccggcccgctgggcaccacgatcagcttcacacaggcaaagctcggtttgatctggctttgccctgccaccagcactacctcaaactggcgcttgagggcgaacttcaccacttggtccttggccgcccgagggcaggcgtcggcgtcgatccacacgcgcatgctacgccgccacccggcgcttttcggtcaggcggctacggccatacaacaccacaatcgccaggatcgccacggcctgtgcccccaacgagtacgcatcggcgtggatgcccagccagtcgaagtcaaagaacgccaccggccgcgtgccaaagatgcccgcttcctgcaaggccttcacaccgtgcccggcgaacactaccgacaacgcacacagcaacgcggcattgatgccgaagaacagcgccaggggcagcttcgccgaaccgcgcaggatcacccaggccaggcccaccagcagcaccagcgccgtggcaccaccggccagcaccgcgttgtgcccggcagggccggcctgcagccacagggtttcgtagaacaggattacttcgaacagttcgcggtacaccgagaagaacgccagcacggcaaaaccgaaacgcccaccgccgcccaccaggctgctcttgatgtagtcctgccaggctgccgcgtgacgccggtcgtgcatccacacgccgagccacagcaccatcacactggcgaacaacgccgtgcagccttcaagcaactcacgctgggcaccgctgacgtcaatgacataggccgccaaagcccaggtacccaagcctgccaacagcgccaggccccagccgacgttgacgctgcgcaccgccgattgctggccggtgttacgcaggaaggcgaggatcgctgccagcaccagaatcgcttccagaccttcgcgcagcaggatcagcaggccagagatatagctcaacgaccagctcaggccatcgccgcccagcaaaccagccgattcagtgagtttgcctttggctgcatccaagcgctgctgcacctgctcgataggcaaaccgtcctgcaacgattgccgataagccatcagcgccttctcggtgtctttgcgcacattggcatcgacgttatccagggagctttccaccagctcgaagccttccaggtaggccgcgacggacagatcataagcctgctcgtggtcgccgttgcgaaaggctgcgaggctcttgtccagggtggcggcggtgtaatcgagcaactgcgcggggccacgctgaacctgcggcggctgcgcacgctgggcgcggaatgtcgccgcagcgccagggccgtcagcggcgagcacttcattgggggtctggcgggccaggtcggcgaggttgaatgtctgctcgcctttcgcggcggccgggtcggccgtgaagccggcgatataggttgccaggtcccagcgctggcggtcgtccagttggtcagcgaacgacggcatgtcggtgccttcgacgcccaggccgagggtgttgtagatcgcatagaggctcaagcgatccaggcgtgtggcatcgcgcaggttagcgggtggcggcgtcatgcccatgcctgcggggccatcgccggcacctgctgtgccgtggcacaccgaacaatgctgggcgtagagcggcgcgcctcgggtcgggtccggcgtgatggccggggcctggctgacttcatacgccacggccagcttggcgcccaattgacgggcctggcgggcaacgctcgctccatcctggtgtgcagtgactgcggccagcagttcatcaacgccctttatcagctcggcgcgctcgggtttgtctggcaaatcagccacaagcccctgcaacaccccgagaaattccacttgttcacggtattccgagtcatctaccaccttgcccgcctccaccgtcggtgggtagtcggcgccaatgtagtccagcaaatgcagggcttgcggcgcgccctcggcggtcgcggccaacagattggagctgcacgacagcaacgccggcaacagcagccaggcgagaaagcggaaaggggcggtcatgaatgaatctcaagtggaaatacgaagtaacactattgttgagctttaatggattcgactcaaggtgttatttcatatcactacaaaacgagtgtgggagcggggttgctcgcgaatgcggtgcttcagtcactatttcctttgactgacacaccgcattcgcgagcaagcccgctcccacatttttggtccgtcgcttggtcaggccgtggcgcgatgcaggctcgccaggaaaccggcagcgccgacaaacaagccagcaaaggtgcggtttacgcgtttctgttgtttgggtgtacgcaacaggcgcaagactttcgacgccaaccctgtgtagcccgccatcacgatcatatcgacgctgatcatggttgcacccaggatcaggtactggaccaacaacggcgcctgcgggttcacgaactgcggcagcaccgccagcatgaataccagcgccttggggttgctggcgttgaccagaaaaccgcggaacatcatcgccatcggtttgccaatggggcgtacggcggcgtcgtcggtcatgtccatgggcaaagcgcgccattgcttgatggccaggtacacgaggtaggccacgccgaaccatttgatcgcatagaacgcagtagacgaggccgccagaatggctcccagaccacccgcaaccacggcaatctgcatcgccaggcccagttgcaggccgatggcgttccagtagccacgcacaaaaccgtactgcaggccgctggacattgaggcgatggcgccggcgccaggagaaagggagatgatccaactggccaggaaaaaggccagccatgtatcgagagccattgcacacctcgtaagggagttagcggttgtgccttaagctaactcctgcaaccaaaggctggctatagatttctgtaggagcgagcgtgctcgcgaagaacgtcaacgataacgcgggcaaactggatgaacgcggcgctctcaggttcttcgcgagcaagctcgctcctacaggatgttggtgccagagccgggccaacggcgtaccgaacgctggaagaacaggctattgggcacctgcaccatcgcgctgttggtcccggcttcctcgacttcgatcagcgtggtgtagagcaagttgatcgccacgacccggcccttcacgcccggcttgtcgacggtgtccaccaactcgacgatatcacccaggcgaaacggcccgacggtaaagatcaggatcgcgcacagcaggttggacagcaccgaccacatggcgaaaaacgccacggccgccaccgcgacaaagcccgacagggcggtccacagcaccgtggcggacacacccaggcggcccagcacaaagatcagcgcactgcccatgatcagccagcgcaagccgccgcgcaggggcatcagcaattgcggcgggaacgggtagcgctcgcccaggcgtgtcaggcctttggcgacgaagcgctgggctaggtagccagccagcaggatcagcaggatttgcacgccgatccagatgggctcgatccattgcaccggtactggcaattgcaacgcttccatcaggacagcgcctccagttgcgcttgcagggtttcgagcaattcgagggcctccatccaggtttcctccaattgcccctcgcgcaccttgagcttggcctgttcggccaacaggtcacgcagttcatccttgcgcgccgcctcgtagacggcgctgtcgcccaggctggcttcgatcttggccaggcgctcatgcaccttgcccagctcggcttccagcttgtcggcttcgcgcttgtgcggtgccaactgctggcgcagcgcggcggcggcctggcgctgggctttcttgtcggtcttgtccgggttgaccggcgtgttgctggccggcgcattgcgcaggcggtattcggtcagccagcgcgcgtagtcgtccaggtcgccatcgaactcttcgaccttgccgtcggccaccagcaggaagttgtcggtggtgctcttgagcaggtgacggtcgtgagacaccaccaataccgcaccgctgaattcctgcagggccatggtcagcgccaggcgcatctccaggtccaggtggttggtcggttcgtcgagcaacagcaggttgggccggtcccaggcgatcagggccagggccaggcgggctttttcgccaccggagaagttcagcacgggctcgtcgatacgcgcgccacggaagtcgaaaccgccgaggaagtcgcgcagggtctgctcgcgctcggctggcgccaggcgttgcaggtgcaacagcgggctggccttagcgtccagcgagtccagttggtgctgggcgaagtaacccaccaccgtgttctcgccacgagtgaggcgaccggccagcggctcaagctcacccgagaggttcttgatcagtgtcgacttgccggcgccgttcgggccgagcaaaccgatgcgggcgcccggcgtgagctgcagcttaaccttctccaggatggttttgtcgccgtagcccaggcgagcgtccgagaggtccaacagcgggctggagatcttcaccgactcacggaagacaaagtcgaacggcgaatcgacgtgggccgccgacagctcttccatgcgttccagggccttgatccggctctgcgcctggcgggccttggtggcctgggccttgaacctggcgatgtagctttccatgtgcgcacgttgcgcctgttgcttttcaaaggcctgttgctgctgggccaggcgttcggcgcgagcgcgttcgaacgcggtatagccgccacggtaaagggtgattttcttctgttcgacatgggcgatgttatcgaccacggcgtcgaggaaatcccggtcgtgggagatcagcagcaaggtgccctggtaactcttgaggaagtcttccaaccacaggatcgcatcgaggtccaagtggttggtcggctcgtcgagcagcaacaggtccgacggacacatcagcgcttgggccaggttcaggcgcatgcgccagccgccggagaaatcggcgaccggacggtccatctgctcgttggtaaacccaaggccggcaagcatcttgcgagcgcgggcgtcggcggtatagccgtcggcgctgtccagctccgagtgcaggcgcgcctgggcggcaccgtcctgggctttttcggcttcggcgaggtcgtgttgcacctggcgcaggcgcaggtcgccatcgagcacgtagtcgatggcgatgcggtccagggtgtcgatctcctggcgcatatgggcaatgcgccagtcggccggcagcaggcagtccccggaatccggggtcagctcacccagcaacaaggcgaacaacgtggatttgccggcgccgttggcaccgatcaggccggctttgtgaccggcgtgcagggtcagctcggcgtcttcaagaagacgttgcgggccacgctgtaatgttaggctttgaagtcggatcataatggcggcggagtctaccagcttcgttggccgctggcttgggtgtgaatatgtacgctgacctgtggagctttgccctttcgacctatgctctcccgggcgtggaggccgcgtgcctgcgcttgcaggagcaaggtgcagacgtgtgcctgttgttgtgtggtgcttggctggagcaacgaggtgtggcgtacaagcccgaacgcgttcaggcattgcaacagatcgctcagccgtggcgggtgcaggtagtcgaaccgttgcgacaaatgcgcgtgcaatggcgcgccttggcccagcaggatgcgcaattggcatctctacgcgagcagatcaagacactggagctggaggccgaaagaacgctgctggcacgcttggaagcgctggcgcaggcatggccgatcaatgaggtgccgggtcagcaagaatggcgtgaaggcctggcgaccgaagccgccaaccttgaccacgacgcgctgctgcaattgcgcgtcatggccaccaacacttaggaagcgctggttggggtggtgcttggcgctaccggtgcaggagtgctgctggccgatgcagttggagcggtggctgctgccggggtggcagtgggggctgctggcgtggctggcttggcgggcgctggcttggcagttggcttcgcggccggttttgcggcagcaggtttagcagctggcttggcggctggtttggcagcagcagttttagcggctggcttcacagctggtttggcagcagcaggtttagcagctggctttgcagctggtttggcggcagcagttttagcagctggcttcgcggctggtttggctgcagcagttttagcagctggcttcgcggctggtttggcagcagcggttttagcgactggcttggcagctggtttggcagcagccgttctagcagttggcttcgcggctggtttggcagcagcggttttagcggctggcttggcagctggtttggcagcagcagttttagcagttggcttggcggctacttttgcaggcgtacgagcacccagtgctttagctacggcttccttcacacggccaacaccttgggccagtttcaggctttcttgagcgtcttttttgagttgggaaatgtagctgcgggtttcggcttggcgatccttgagagcatccagcagctcttcaagttctttgaccgcacctttggctttggcttgtgccttggacttgccggcagtggcggcgtcttgcagtttggtacgggacttgtgcagtttttcttgcgctttaccgcgctgcttttccagtttggcgagcagtttttctgcatcagccaaggcttgggagcacgcgctttccagatgttcgagcaggctgcccgaaagttgttggagcaagtgcaacggggtatttacaggcttctgtttggccgacatggtttacctcctggctgacgtgggtgcggctcatactagccctctgctcttaccgccgctagggcatgttgacagtatcctttgccttgcgttgcacagtgcgaaaattcttatcgatataacggaaaaccacgccactttttacgcactcgcactggcataatccgtcgcactttcgccgggagaatgaccatgtcgcgttacctttttctagtgttcggcttggcgatctgcgtggccgatgcaagcgagcaaccctcgtcaaacaccaccgccgcaaccccgtacgatcttgcctatagcctgggcgcaagccttggcgaacggttgcgccaggaagtccccgacctgcagatacaggctctgctcgacggactcaaacaagcctaccaaggcaaaccactggcgctggataacgcgcgcatcgaacagatcctctcccagcatgaagcgcagaacaccgccgacgcccaactgccgcaaagcgaaaaagcactggccgccgaacagcaatttctcactcgggaaaaagccgccgccggcgttcgtcagctagccgacggtatcctgctcaccgagctggcaccgggcactggcaacaagccgttggccagcgatgaagtacaggtgaaatacgtgggccgactgcctgacgggactgtcttcgacaaaagtacgcaaccgcaatggtttcgcgtcaacagcgtgatcagcggttggagcagtgcattgcaacagatgccggtgggtgcgaaatggcgcctggtgattccttcggcccaggcctatggcgcagacggcgcaggtgagttgatcccaccctatacgccgctggtgttcgaaatcgaactgctcggcactcgccactgacccataaaaaaacggtgcgacatgcgcaccgttttttatctcgccatcagcttcaagcctgggtggcgggctcttctttatgagcgttgtgcagcacttcgatcaagcaatcttccagttcgaaacgctcatgcaacagcgcgcccaattccttgaatttttccgcaacacatttcccggcatcacacaggtcggtgaacgccagcagcttttcagtaatcacatcgatgcgcgggtaaatcgtctcggccaactccaggccacgctgatcatcgaaggcttcggcctccttggtcagttgctcgtagacgccgaaatggccggcagacacgtagtccaccagcacaccgcagaattcctgcaatgtctcgcgattctcgcccaacgcttcgggcttggcgccgagagcatcaaaggcccgaaccagttcgtgacgtgccttcaaccagctgtcgatcagcttgtgcactccaccccagcgttcctgagcattctgacaactttccaacatgatgatctctcttccctattggggcgccgcagctctgtacctgcgcaacacttcaaggatgaagcagcagacggacaaggccgcgtctgacaagcggtttggataacgcgtgcgggccagattatgcccgcatgactatggcttcaaggtacgcaggagagaatgttcatacaagtgtttaatccgctcctacaacctgagtctcgttttcaatgcactgcgaggcgcaaatgcctgccgaacaacaaccgtgatacctgcatgagccccaggatcagcatcgcgacgaagaacaacaggctccactcaggcaggctcaggtcaaatagcgtccagttgatttcgacacaatcgaccgtgccattgaacaccgagcgcatggcctgccagacagacaggctttcaagcatgtgctgcagactgggccagcaatcccccacctgacttgccggcctgttctgcaacaggacttgccggcctgcggtgatggcgcccagcaacgcacagcccatactcgccaacccataaaggcaaaggccggaacgcccaggtttgtgaagcacggcaatcaggttgatcaatgcaaaagacgcgaggaacaggcgctgtacctggcatagaaaacacggtcgtagcagcgcgccgtattgaaggtagaaagacgcgcccaacgtcagcgcacccgccatgaacgccaggaaaaacaaagagcgtaaaggggccaaagacattgtttatccgcactgcaagagataggtcgctacggtagaggaaaggcccgacccctttcaatacgccctagagcagacatttcctcgaaaacataaggacatcccgccacgagcccgaggaaattcagttacaacaagtaggaattagcaacaaggccagttaaaccgagtgtttgcagggtttgaaggatcgggggcggatcggtccgagccaatccactcaccctttcctactttaaactcgcgcaggcaccggcagcggcgaggacagcagacgattgtcgagcaaccccaagccttcctgaaacagctggttgctgcgctcggtgtcgcccaattgggccagcagccgagccaattcggcgcaggcttcgggattgcgttgtacttgcaggctgctttccagataatcccgcgccttgccccacagactgttttgcaggcacagacgacccagcgtcagcagcaggctggcatcgcctggatggtccttgagccagccttcggcaaacttcaattgacgcgcagggtcactgccgcgcagcaggccatacagccggatcaagtgactgtcgtaaccgcgcttgagcgcaccacgcagcacttcttcggccttggcatcggcgcccaatcgacgcagttggtcggcatacgccaataccagttgtggctgttggcgctgggcagcggtcagttgctcccatgcgcgctccaaggactgcaaccccgcctcgccttgctcttcacgctgggccgccaggctcaggttctcgccccacgcgcggcgctccagctcggccagctcattggcgggcaagactttgtccttgcgcagttccggcagcaggcgaatcaccgacgaccaatcgccacgctgctgatgcaggcgttgcaactgtcgcagcacttgcgcgttatgcggatgacgctcatgcatcgcctgaagggtgaccagagcgccttccgtatcgccacgatccatctgcaattgcgcatggctcagtgcaatggccagttcggcctggggctggcgctccagcgcgcgctccagcaaaccgtcggattcctcataacgaccctgctcattcgccgcacgggccgcgccgatgtaatacagcaaaggttgacgctctgcttcggcggcgcggtgcaggtggcgttcggcgctggcccagcggccctcggcgaggtccatctggccttgctcgatagcaatctgcacacgacggctgcggttgcgtcgtgaccaagggttgaccacgccaccggatgtggtaaccaggctccacaacacacgaatcaggtaaatcgccaggccaatggcgaacagcgccaccaatgtcgcccacaggcttgattcgtaatgcagcaagtgaggataggtaatcaacacgtagccggtgtgcttcgaaatgcccacgcccagggccagggcgagcgcaattgcgagcaccaggatcacatagaaacgcttcatcagctctactcctgggtcgccggtttgccagccgaggccttggcttcgtcggcagacagatgacgacgctcaaggtacgcctgcacagcagccaggctcgcggccaggtcaggcgtgaccaccgacacggccttgggctcgagctcggcaatacgcgccagcatcgccttgctctgcgggttgtcctggttgaagttgtcctgcaacacgctgcgcgcttctcccagcgagcggctgtacaccgccgcctcgccgttaagcgcagcccactgggcttgctccagcgccaggctcaaggccaggcgcacttggttcagaccttggcctgccaacaatgggcgaatgttgtcatccgggttgaagtcgatgcggaagtaacgggaaatctgctcccaccattggctcaactggttctgcgtatcgctggtgggacgcccctgggaagcgggctcggtgagctgatactctggggcaatcgccgccagttgcaccacttggtcacgcaaggcggccagttgcaggtacaggccggtacggtccggttgctcggtgctgcgcagcgcggccaggctcttggccagttgctcgcgtgcggcgaaagaccctgggtcgctctgctcgcgaagaatctcgtcggccccctggaccagcgactgagcgctgttgatgtcttgcaaggcggacaaacgcaagctggccagacggatcagatgctcggcctcggccaggcgccagtccttgcggctggcacccaacacggtttccagacgctggttgaggcgctgctgatcaccctgtaactgagtgaccagacggcgacgttcttccagctcatccgcacccggcaactgcgccaggcgggcggccaactgttgctggccttgcttgaggctctgggactggtcatccagggtctgcacctggcccagctggtgctggctgctggcttgcagggcacggacctgccagatcccccaaccgccggcggctacgcccgcagcgcccaacagcaaggcgacgatggccaggccattgccacggcgtggcgcgctgaccggtgtctcgaccggcgcatcaagcgcgggctgagcttcatctttaggcaaggctgtttcgctcacgtatccgtcctttgcgtatcagagagtgggaacgggatagctccctaacgccactaacaaagccgcggcactcgcaccgcgacaatccacaactttttctgcacccgcggcccgcgccatttcatatacacgcgggcttggcacgaacaacggcagctgtgccacctctggccaatcggggccggccaacgcgtgcaagtgtaaaaaaccctgcccactgctgaccaccaggccgttcaagcgttccaactggatgcgttgcatcagcgcgcccttctcatacactggaagaaaacgccgatacaattccaggtagtcgacactagcaccttgctcgcgtaaacgctctgccagcaactcgcgcccgccctcgccacgcagaatcaacacccgggcgcccggcactgcaatagcctcgcgcaaggcgggcagttcaagcaaggcctcgctgtcatcgcccgtggcgggacagtgaacgttaaggccatgatcggccagtatctgagccgtggccgcgccgacactgaaccagggcattggcggcacactgccccccaactgctgcaacgccaggcgcgcggccggcttgctcaccacgatgacggcgcaatagcgcggcagcgcgccgaacaccgcgcgttgctcagcggtcaccggcaaggcttcagtctccagcaaaggcaggcagttgctgtgaataccgctctgggctaataacgccgccagggccgtcgactcctcggcaggccgcgtcagcagcactcgccaatcggtcactgcgggccggcctcgccatagactttttgcaaaatggcacccgcgcctttttccagcaacgcttcggcgacctgaatccccaaggccgtggcatcacgttgcggcccacgcacctcggcggtcagcaggttaccgccgtccggatcaccaaccaagccacgcagccacaggttctcaccctcgagtacggcatagcaggcgatgggcacttggcagccaccgttaaggtgtttgttcaaggcacgctcggcggtgacgcgcacttcggtgtctgcgtgatcgagaggttttagcagcgcatgaatttcgctgtcggcggtgcggcattcgatcccgactgcgccctgcccgccagccggcaggctgtcttcgacgctgatggccgaggtgatgcggtcttcaaagcccaggcggatcaagccggcagcggcgaggatgatcgcgtcgtattcgccggcgtcgagcttggccaggcgcgtgttgacgttgccacgcaaaaagcggatctgcaggtcgggacgccgcgtcagcaactgggcctggcggcgcaggctggaggtgccgacgatactgcccagcggcaattcgtccagggacgcgaaggtgttggaaacaaaggcgtcgcgcgggtcttcgcgctcgcagatgcaaaaaaggcccaggccttcaggaaagtccatgggcacatctttcatcgaatgcacggcgatatcggcttcgttgtccagcagcgcggtttccagctccttgacgaacaggcccttgccgccgattttcgacagcggcgagtccagcagcttgtcgccgcgactgaccatgggcaccagggataccttgaggccgggatgggcctgctcaaggcgggctttgacgtattcggcctgccacaaggccagggcgcttttacgggtggcgatgcggatttcgcgagaggacatggatcaatccgtactgaatagatacggcggataataacagctcaggcaaatacgctttgatttgaatcagcaagtgcggggcctccctggccacgtcgcaccgggattaggaatgcagaccgcgccgcagcccttgggctaaagctgctgcatcatcttgcgcacgccggcgacatggcgtcggctgacaatcaaggcatcgccattgagccccttcaggaatagctgaaagtgccccaggggcgtgcgctgcaggcgctcgatgcgttcacgggcgaccagcgcattgcgatgaatgcgcacgaaacgctcgccaaactcgtcttcaagggccttgagcggctcatcgagcaacacttcaccggtctcgtggcgcaaggtcacgtatttgtgatcggcaataaagtagaccacttggccgagtgggatcagctcgatgcccttgcgggtacgcgcactgatatggctgcgtggcccgttaccactttgcgcagccggttgcgtcaaggctgccagttgggcgcggctggggcgctcagcttttttcagggccttgagcaaagcttcggcagtggccggcttgacgagaaaactgacaccgctgtcttccagcgtctgtgcagaaaactcatcctgcgccgcacacaacaccacggcgggcggcgattcgcgttcgctcaagcgggcggcgacttgcaggccgtcgaagcccggcatgcggatatcgagcagcactacatccggcttgtggctgtcgatcagcgtcaacgcctcttcgccgctggtggcactcggttcaaggactgtataaccctcgagttcactgaccagacggctcagtcgctcgcgggcttggggttcgtcatcaacgatcaggacattcatattgcgctggattcctgcgtgagtctcgcacaaggatagcgtagacaggtgcggtgactgacgtcacagcgatccacgctaagactagcgcgagcggcaaaaagtgccctgagaatggcacccaaatttacccggacctgttcaatagcgcccaagacccgctgccttcgggcatcgtcgtagggttcactgataaacaatccgaatacccccctgtttaatggatagtctggttatgaccgcatcacccgactttggtgcattcacacactatcagtccaactgtagacgctcactgaggcgacattgcccaatcgtcaaatatcgtttcaataagtacctgcccccagtctcgtcccggatgcggtcggcggcaaggcacttagccatctcttacacaaataaaattgccgaccacccgcagcaccgcctccacgggcaaccctgttatgatcgccggcacaccttcatgcctcttttaagcagatcacgagcgaatccatgagcaccgacaagaccaaccagtcctggggcggccgcttcagtgaacccgtcgacgccttcgtcgcgcgcttcaccgcctccgtcaccttcgatcaacgcctgtaccgccacgacatcatgggctccatcgcccacgccacgatgctggccaaggtcggcgtgctgaccgacgccgagcgtgacagcatcatcgacggcctgaccaccatccgcggtgagatcgaggcagggacgttcgactggcgcgtcgacctggaagacgtgcacatgaacatcgaggcacgcctgaccgatcgcatcggcgtgaccggcaaaaaattgcacaccggtcgcagccgtaacgatcaggtcgccaccgatatccgcctgtggctgcgcgatgagatcgacctgatcctgggcgaaatcacccgcctgcaaaaaggtttgctggagcaggccgagcgtgaatcggacaccatcatgcccggcttcactcacctgcagaccgcacagcctgtgaccttcggccaccacctgctggcctggttcgaaatgctcagccgcgactacgagcgcctggtcgattgccgcaagcgcgccaaccgtatgccgttgggcagcgctgcactggccggcaccacctacccgatcgaccgtgagtacaccgcacaactgctgggctttgacgccgtgggcggcaactcacttgacggcgtgtcggaccgggacttcgccatcgaattctgcgccgcggccagcatcgcgatgatgcacctgtcgcgcttctccgaagaactggtgctgtggaccagcgcgcaatttcagttcatcgacctgccggaccgcttctgcaccggcagctcgatcatgccgcaaaagaaaaaccccgacgtgccagagctggtgcgtggcaagagtggccgtgtattcggcgcactgatgggcctgctgaccctgatgaaaggccaaccactggcctacaacaaggacaaccaggaagacaaagagccgctgttcgacgccgccgacaccctgcgcgactcgctgcgcgcctttgccgacatgatcccggcgatcaagcccaagcacgcgatcatgcgtgaggcggccctgcgtggtttctccaccgcgaccgacctggcggactacctggtgcgccgaggcctgccgttccgtgattgccacgaaatcgttggccacgccgtgaagtacggtgtggacaccggcaaggacctggcggaaatgagcctggaagaactgcgccagttcagcgaccagatcgagcaggatgtgtttgccgtgctgaccctggaaggctcggtgaatgcccgtaatcatgtgggcggcactgcgccggcacaggtcaaggcagcggtcgtgcgcggcaaagaattgctcgccagccgctaaaagcatcgcaggcaagccagctcccacatttgattgggttcacacatcaaaatgtgggagctggcttgcccgcgatggcgctcttatcagatgccaaagatttatttcttggccgcaatcatcgccatgaacgctggcatcgccgcctgcctgtccgcctctaccttctgcgcgttgggcatctcattcaggcgcgccaacaaggtcttcgccttcggcaactgcgccagcaggtccaacccaaacagcttctcgcccacaccgcaggccaggttcaagctgtacatgaaatacaggtccgcgagggtgaagctctcccctgccacataaggcgcgaacttagcgtgccggcctaacgtaccgatcccaagcaacagctcggccctggacttttccttgatcgcctccggcaccgtcatgccaaaaaaagcctcggcgtaacacgcccgcgcaggcagctcgatgtacagctcgatctcacggcacagcgccagcacctgtgcccgcgcaaacgggtcggcgggcagcagcgcagggccttcctggctctgctccaggtattcgaggatgacgctggtttcgttgatgaacccctgcttcacacccagcaccggcactttgccgcgggggctgaccgccaaggcttcgggggtttgcccggcgtaaaaaggcacttcttcgaagggcagtcctttctccaacagcgccagcttgaccatgttgtagtagttgctgaccgaaaatccgtaaagcttgagcattgcaaagcctccaggccgggtgtggggttggctgcaagagttatagatcctcgaggccaccctgaccagcagcatcacccacctgaatgggggtagactgacgccctttccttgaggagcctgccatgagcgagccgaccgatatcgacaacgacgaagaagaattcaccgagaccacgctgatcgaagccatcgagaaccagatcgagagcgataacccgccagcggccaaggctacgttcaacaaactgaccctggtgggttacgagcgcgacgatatcctcaatctgatggctcacgtgctggccttcgagatcgacgccatgctggacgaggaccgcgctttcaataccgagtggtatgaaacggcactgcgggcactgcccgagctgccgccggaaaaggaataaccccggcacgcagcaacacgctggacagttcggcaaagtgcgttcaccttatggcctgctagcctctaataaattttagaaagtctggagtccttatgtcgtatacccctgagttggttgccgaactggaaatccttgtactcttccccttggacagcaccaaggaaggcttgaaagtccatcagactgccgcccctactgccatcgccgctgccaagcgcctccatgccaaagggctgattgaccaaccggacgggggctacctgacgagccttggccgggacgctgccgagcaagcccaaaccctgctgaccatcctgaccactgccaacaccaaagaagccgcctgatacttgataccgcccatggagtccgccgcctgcggattccgcgggctttgctgcgcggcatacaaaattctgacgccaaaaagccacttccctctaaaactcctacgctactgtctgtaaactcctgcatggccgcccgcgtcgggccctgcgagccaacgagttcgacatgacccgcacccatgaaatccgccccgatctggacgaaggcatcgaccgcaaggtactgacccaactgcgcgcgcgtttcatgaccctcaatcaaggccgcatggcccgggccgtcgaggggctgacgccacgccagcaaagcgtgctggctttgttgccgctgtttttccacgtcaatcatccgctgttgccgggctatgtctccagtaacacaccggctggcctgtcgaatttcgaaccggacgcccaggccttggccgatgcccaacgcctgacacgctcgttctcctataaaccgcgccatggcaacccgcctacgccgatccacggtttgttcctgatgggcagccttggcacgctggcgcaggccgatcaaagcgatatggacgtgtgggtatgccacgctcccgacctgagcgagaccgagctggccgagctgcgcaaaaagtgccaactgctggaaacctgggccttgggcatgggcgccgaggcgcatttcttcctgatcgacccgacgcgctttgtgttgggtgatcgcgatacacaattgagctccgacgactgcggcaccacccagcactacctgctgttggatgagttctatcgcaccgcgatctggctggccggacgcacgcccatctggtggttggtgccggtctacgaagaaaaccgctacgccgagtttactcacgcactgatttccaagcgctttatccgcgccgatgaaaccctcgacctcggccatttggctcatattcctccgggggaatttattggcgccgggctgtggcaactgttcaagggcatcgagtcgccctataaatcggtgctcaagctgctgctgaccgaggtctacgccagcgaacacccgaaggtgcaatgcctgagcctgcgcttcaaacaggcggtgttcagccatcaggtagacctggatgagctggacccgtacatcatggtctaccgccgcatcgaggaatacctcaaggcccgcaacgagctggagcgcctggaactggtgcgccgcagcctgtacctgaaggtcaaccgcaagctcagcgccggccagcgcaccgctggctggcaacggcagctactggaacgcctggcgcatgaatgggggtgggacacacgccaactggccctgctggacagccgcagccaatggaaagtgcgccaggtcgcttccgagcgccgcgccctggtcaatgagttgaactacagctaccgcttcctcacccagttcacacgcagtgaacagtccgccagcccgatcaataaacgcgacctcaatgtactgggccgccgtttgtacgcggcgttcgagcgcaaggccggcaaggtcgagtttatcaaccccggcatcgcccccgacctggccgaagacaccctgaccctggtgcagtcgcccaaccgcaaggagccgggccaacaccattggggcctgtataacggcaaccttaccgccctggaatgggagcactttgcgccgatcaaacgcagccgcgacctgctggaaatgctcacctggtgtcatcgcaacggcgtgatcgacagcagcacccgcctggcgctgcaccccggcaccagcgacatgaccgagttcgagcttttcaacctgctgggcagtctgcaacagaccatcgccctgcccctggccagtgtcgatgagagccgcttgctgcgcccggcagtgccggaagaggtgctgctgctgatcaacgtcggggttgatccgctcaagcatcatcgcgacctgaatatcctgatgaccaccgagcgcaccgactccctgagctatgccggcgtgcgcgacaatctggtgctgaccctggaccaggtcacgctcaacagctggaacgaagtgatggtcagccgctatgacggcccccacgccctgctcgactgcctgcgcgactacctcaaccaactgccctcgaaccatctgccacgcctgcgagtgcgttgtttttgccacaaccgggcacagttcattgcccagcgggtggaagaggtattcgacaccgcgcagcatctgctgctcggccagggcaatcatcgctacctgctccaggtgcagcagcattatcacgtcatggaactggtaccgggccaggccacccatgtgtcactaccgacccaggacgcgctgatcgcctacctcagcgaggagctggtcagctatagcccgtggcacctggacgccatggccttggaagaccacgacctggcgctgctgctgcccatgggccaagccgagtgtgtgcaggtgttctaccgggtcaatgaaggcttcgccgacgtctacgtgctcgacgaattcaacgcgctctggcaacagcgcttgccgtttcatgatgagcaaagcctgttggcgccgttgcagcgctttttgcaatcgatcctgtatcgccgcgaagcactatcgtccctggacacccagcaacccgcgggcgagatacagatcctgtattaccaactgttgccatcgggcagcggccgtgcgcggggcgttgagccaaggccggccccgcaagacccggccaacaaggcgttttatgacgtgcaggccattatcggcaaaggcacgccaggccacgtagggatcaccctgtactgcaatcagcgggagttttccgaactggaatttggcgaccagctgtttacggtggtcgcccgggagatcgtcgggcaacgtcgggaaaccgagcgttaccgctgctatatcactgacctggatctgtcggggctgctcggtgatgtgcaaagcccaagcaatctgtacctgcgctataaagccgaactggaacagtcactcaatgcggccttcaatcaggtttagagcgggaaggcgccgccatctttgggctggccttcgacgctgagcaattccagcttcaggatcttgccgccaggcgccggccagtcgatgtgctggcccacttgcaggccgagcaacgcgctgcctaccggcgccatgatcgaaattttgccttcgtcggcgttcgcgtgcttggggtagaccaacgtcaggtgatagtccttgccgctgctttgctcacggcaatgcacgctggagttcatggtcacgacacccgcaggcacttcatcgtgaccaaccacgtcttcggcgcggtcgagttcggcttgcaatgcttcggcgccgggagagttgtcgcccaagcggtcgatcagttgctccagacgctgcacgtcaagacgggtaagaatgatggacggtgcggtggtcatgattcaggcagactccttttttctgcacaaaaaagcaaaaccccgccaggaaaaggcggggttctcacggacctcgatgaatggaggtgtatccggacactaccacagcgacacaaataaacaagacgccgtcaggtgctcgccttgcgctgctcggcctctgcacagatcacccggcgccgcgcatcgtcggcagagcgccattcccggatgtcttccacatggcggaagcagccaaggcaaactttctgctcgtccaggcgacacaaactgatacaaggtgacggcaccgccgggctgacattgctgaacagcggcttgggcgggcgtacggttgcaggctcactcaccatcagatctcgtcgaaatccagttcgtcgccggtgtattcctggaccaggcgggcgagcatctcacccagcaactcttcactcttgtcgcactgccacttaccgctttcttcgtcgtaatcgaagtgaacgccaccggagcgcgccgccagccacagctgacgcagcggctcctggcggctgaagatcagttgctggccgctctcgaacttgacggtcagcacaccggccgagttttccagatccacgtccaggccgctgtcgtcgaaaatatcttccagcccctgctgggtggtatccaccaggtcgtgaaaacgggcttcggtcaaactcattgtggcaacctcaaaagtgtctggttttgctcaagcgccgcacgatacgggcgagcttcgccgattgcaaaggatactgatttcatcacggatgacggtacgaaatatccccaggcatcgtagcctgcttccctactgtctcggcaaacccccgccggacgggtgttgcggcgcataggcaagctggcgggtggtcggtatactcgggcgcaattaatgcatattcaaggatttcgccatgaagcgcctgatctcttcccttgctgcgctcgtcgcggtcgcttgcctcgttagtgcctgtggccagaaaggcccgttgtacctgcccgatgacagcaaagatccaaacgaacaggcgcaatcgtcgcaaaagacgtcaaaagcccataagcacgacacctactaagccaagggaaacttatggacgcttttaactaccgggacggcgagctgttcgcggaaggcgtggccttgtccgcgattgcccagcgcttcggcaccccgacctatgtgtactcgcgtgcgcatatccaagcccaataccgctcgttcaccgacgcgctcgacggcgtgccgcacctggtgtgctacgcagtcaaggccaactccaacctgggtgtactcaatgtcctggcgcgtcttggcgctggttttgacatcgtgtcccgtggcgagctggaacgcgtactggccgccggtggccaggcggacaaaatcgtcttctccggcgtcggcaagagccgcgaagacatgcgccgcgccctggaagtcggcgtgcattgcttcaacgtcgaatccaccgacgaactggagcgcctgcaagtcgttgccgccgaaatgggcgttcgcgcgccgatctccctgcgcgtcaacccggatgtcgacgccggcacccacccgtacatctccaccggtctcaaagagaacaagttcggcattgccatcgccgacgccgaggacgtgtacatccgcgcagcccaactgccgaacctggaagtgctgggcgtcgactgccatatcggctcgcaactgaccaccctgccaccgttcctggatgccctcgaccgcctgctggccttgatcgaccgcctcggcgagtgcggcatctacctgcaccacatcgacctcggtggtggcgtgggcgtgcgttatcgcgatgaagagccgccactgattgccgactatatccaggccgtgcgcgagcgcatcgaaggccgcgacctgacgctgatgttcgagccaggccgctacatcgttgccaacgctggcgtgttgctgacccaggtcgagtacctcaagcacaccgaacacaaggatttcgccatcgtcgatgcggcgatgaacgacctgatccgcccggcgctgtaccaggcctggatggatgtcaccgccgtgacgccgcgcgcaagcgaagcccgcgcctatgacatcgtcgggccgatctgcgagaccggcgacttcctggccaaggatcgtgagttggcgcttgaggaaggtgatctgctggccgtgcattcggccggtgcctacgggtttgtcatgagttccaactacaacacccgcgggcgtaccgccgaggtgctggtggacggtgatcaagcatttgaagtgcgtcgccgcgagacggtagccgagttgtatgctggcgaaagcctgctgccggagtaagccatgctgctgcgttttaccaagatgcacgggctgggtaatgatttcatggtcctcgacctggtcagccagcacgcgcacatcctgcccaagcacgccaaacagtggggcgatcgccacaccgggatcggtttcgaccagttgctgctggtcgaggcgccgagcaacccggaggtggatttccgctaccggatctttaactccgacggctccgaagtggaacagtgcggcaacggcgcgcgctgctttgcgcgctttgtgctcgacaagcgtctgactgccaaacgccagattcgcgtcgaaaccaaaggtggcgtgatcgaactggacatccgcaacgatggccagatcagcgtcaacatgggcgcgccgcgcctggtgccggcggatattccgttccaggccaccgagcaggccctcagttacgcgttggacgtggatggcaaaaccgtggagatcgccgccgtgtccatgggcaacccccatgcagtactgcgggtcaccgacatcaataacgcccccgtgcacgaactggggccgaagatcgaacatcacccgcgctttccggcacgggccaatgtgggctttttgcaggtaatcgaccgtaaccgtgcgcaattgcgcgtatgggaacgcggcgtcggcgaaacccaggcttgcggcaccggtgcttgcgccgctgccgtggccgcgatcagccaggggtggatggattcgccgctgttgatcgacctgcccggtggacgtttgtccatcgaatgggcaggccctggccacccggtgatgatgaccgggccggccacgcgtgtatacgaaggacaggtccgtctatgagtgagccaagctaatgaccgataagcctcaagtacccgcacacgcaacctcgagtgaaagcctggaggccgctgctgtcgcggcgtaccttgaggctaacccggacttcttcgtcgaacacgaagagctgctgccggccctgcgcatccctcaccagcgcggcgataccgtatcgctggtggagcggcagatgaagatcctgcgcgagcgcaatattgaaatgcgccaccggctctctcatctgatggacgtggcccgcgacaacgaccgcttgttcgacaagacgcgccgcctgattctgaccctgatggatgccaccagcctggaagaaacggtgatcgccgtggaagacagcctgcgggaggatttccaggtgcccttcgtcagcctgatcctgttcagcgacaacccgatgccggtgggccgctgggtcacaggtggcgaggcgcagacggccatcggcggcctgctgtccgaaggcaagaccgtcagcggcaccttgcgcgagcatgagctggacttcctgtttggcgccgaacagcgcaagcagatcggctctacggccgtcatcgccctcagccatcaaggcttgcacggcgtactggccatcgccagccgcgacccggcgcactacaaaagctcggtgggcacgctgttcctgacctatatcgccgaagtgctgggccgcgtcctgccacgccacaccaccaccctgcgcgcggtgcgctgatcatggagcggcaactggacgcttactgcgctcacctgcgcaatgagcgccaggtgtcgccccatacgctggaagcctatcggcgggacttgaacaaggtcctggcctattgcgaaaaacagcacgtcagcagttggaaggccctggatatccaggccctgcgcagcctgatcgctcggttgcatctgcagggccaatcctcacgcagcctgtctcgcctgctgtcggcggtgcgcggcctctatcactacctcaatcgcgaaggcctgtgcgaccacgacccggccaatggcctgtcaccgcccaaaggcgaacggcgtctgcccaagaccctggataccgaccgcgccctgcaactgctcgacggtgccgtcgaggatgacttcctggcccatcgcgaccaagccatccttgagctgttctattcctcgggcctgcgcctgtcggagctgacgggcctgaacctcgatcaactggacctcgccgatggcttggtgcaagtgctcggcaaaggcagcaagacccgcgtactgcccgtgggcaggaaagcccgcgaagccttgcagctatggctgccgctacgactgctgaccaacccggcagacgatgccgtgtttgtcagccagcaaggccggcgcctggggccacgggcgattcagctgcgggttaaggccgctggcgagcgggagctggggcagaatctgcacccgcacatgttgcgtcactcctttgccagccatctgctcgaatcctcccaggacctgcgcgccgtgcaggaactgcttgggcactcggatatcaagaccacgcagatctacacccacctcgacttccagcacctggcaacggtgtacgacagtgcccatccacgggccaaacgcatcaagggcggcgactcatgagtatcaatctgatcaccttcgacctggacgacaccctctgggacaacgtacccgtcatcatcagcgccgaagcgtcgatgcgcgaatggctggcagttcacgcatccaaggttggcgagctgccccttgagcattttgccagcctgcgccagcagatgctgcagcgtcatcccgaactcaagcaccgcatcagcctgctgcgccatcgcgtgctaatgcatgcgttcgaggaggccggttatccccagcctgaggccacagagatggcggacgtgtgcttcgaagcgttcatccacgcacgtcaccaactcaccgtgttcccggaagccgagccgatgctcaaggcgctgcgccagcacttcctgctgggggtgatcaccaatggcaatgccgatgtgcagcgcgtgggcctggcggactattttcactttgccctgcgcgctgaagatatcggcatcgccaagccggatgcacggctgtttcaggaggcgctgcaacgtggcggtgtggacgccagcgcggctgtgcatgtgggcgatcatcctggggatgacattgccggcgcgcagcaggcggggctgcgggcggtgtggttcaaccccacgggcaaggcctgggaaggtgacaagcacccggatgcgcagattcgcagcctgacggagttgccgcccttgctgagtcgctggagctaacactgacccaaaatgtgggagctggcttgcctgcgatagcggtgggtcagtcaacacagggctcgcagatagaccgctatcgcaggcaagccagctcccacagggtattgcagcgaactggtaaattgctccagacatgaaaaagcccgcagcgacggcgggctttttcttacaagcaggaggcagacctcagataggtcggctgccgtacttgttatccggcttcttcggtggatcagccaccacgttggcctcgacttcctgcactttgccgcctttagcgaggaactcttccatcgcacgggccagggcatcgcgctctttgttcttggcttcaacactcggcaactcgtctaccgaaacagccgccttggctttgcctttggctttgggagccgcgtcatcgccaacactgtcatcggcatcttccgcaacgtcgtcagccgctactgcttcaagaccgtcttcggtgtcgtcttcatcacctacttcgaggtcgtcttgttccagatcatcgtcgctcatgttctacctcatgacttgcgaaaagcagattagttatagcccagcttcaccctctgtcgaggccgctggaaaaaaatcaacatccacaggattccctatggcttatgccccttcaccgtgcaaggtggcgaggactttacgagcaccgccatgatcacggtgctcgcccagataaacaccttgccaggtccctatcgccaagcggccggccttgaccggcaaactcagctggcagcccagcagactggccttgaagtgcgccggcagatcatccggaccttcgtcgttatgttcaaaccctgcgcgaccttgtggcaccagcaggttgaaaaaacgctcgaagtcacggcgaaccgccgggtcggcattctcgttgacggtcaacgaggccgaggtgtgctgcagccacagatgcaacaggcccacacggcacgccttcaattcaggcaagccggcaagcaactcgtccgttaccaagtgaaagccccggggcttggcccgcagggtaatcagggtctgttgccacatacagttctccgcccatcggcgcgcattctagcgcgctctgagaaaaaacaaagggccgaatacgccttcatgcctgtaagacatttgcacccttagaagtgctgtgtggatcccatcacaaagtcgataaaaaacccatgcacctttagccacagacaaacgccgggcaaaaaaatgcccggcaagccgggcatgtttttttcgcgtagttacaagttgtagccgcgctcgttgtgttgcgccaggtcgaggccgaccgcctcttcttcttcggtgacacgcaggcccatgaccatgtcgagcaccttgaggatgacgtaggtcacaatcgccgtgtagatcacggtgaagcccacgcctttgcactggatccagacctgggccgcgatgtcggtcacggtgccgaagccgcccagagcaggagctgcgaacacaccggtgaggatcgcaccgacgataccgccaataccgtgcacgccgaaggcgtccagggagtcgtcataacccagtttgcgcttgaggctggtcgcgcagaagaagcacaccacaccggcgaccagaccaatcaccagggcgcccatcgggcccacggtgccagccgctggtgtcacggcgacgaggccggcgaccacgcccgaggcgatacccagtgcgcttggcttgccgtgggtgatccactcggcaaacatccatcccagggccgcagctgcggtagcgatttgagttaccagcatcgccatgcccgcggtgccgttggccgccgcagcggaaccggcgttgaagccaaaccagccgatccacagcatggccgcgcccaccagggtatagcccaggttatgcggggccatcggggtggtggggaagcctttgcgcttgccgagcacgatgcacgccaccaggccagccacacccgcgttgatgtgcacaacggtgccgccggcgaagtccagcacgccccagtcccacatcaggccgccattgccgctccagaccatgtgcgcaatcggcgcatagaccagggtgaaccagatagccatgaagatcagcatcgcggagaacttcatacgctcagcgaaagcaccgacgatcagcgccggggtaatgatggcaaaggtcatctggaaggtaatgaacacggcctccggaaacagcgccgccggcccggtgatgctggccggggtaacacccgccaggaacgccttgcccatgccgccgaagaaggaattgaagttgaccacgccttgttccataccggtggtatcgaacgcgatgctgtagccgtagacgacccagaggatgctgatcaggccagtgatggcgaagcactgcatcatcaccgacagaatattcttggagcggaccatgccgccgtagaacagcgccaggccagggatggtcatgaacagcaccagcgcggtggcagtgagcatccaggcggtgtcgccggaattgaggactggagcagccacttcatctgccgccatggccaggcttggcattacgatggacagcagggctccgagccctgcgaatttacgcagagtcatattgttttctcctggggcgttggggtttggcggcttagattgcgtcggtatcggtttcgccggtacggatgcgaatagcctgttccagattgaccacgaagatcttgccgtcaccgatcttgccggtgttggccgccttggttatcgcctcgataacccgatcaagatccttgtcgtcaatggcgacatcgatcttcaccttcggcaggaaatcgaccacgtattccgcgccgcgatacagctcggtatgacccttctgccgaccgaagcccttgacctcagtaacggtaatgccctgcacgccgatctcggacagtgactcgcgaacatcgtccaacttgaacggcttgatgatggcagtgactagcttcatgaaaactctctcccgaatttggtggacttgccccaggaaaacaaacccgtctcaagtctaagcgcagtgcctggctttgtaacgcatcgtcgcctcggcatttgccgtcgcgacgccagcgaaccactggtgacgagccctgtacccggatccgtcggcgcactgcattcgtcacagcgactgcatcagtgcatgggtcatgatcgtctaagcagaaaccttgccagctccgtaaaaaccactgaaatcaatccattgcccgcttgtgcccacctacggggcgcctgcgcggccgcaatgcgcatcaaaacagtgcgcggccgcccgccccaatgcgcgaaaaccgtgcgcagcagggcgtaaaaatgactatagacgctgcgtgatacactgccggccaactgttttccggaatatgtccaatgctcgcgcccaaagacttcctcgacgccctgagcggccacgcctctcgcctgttcagcggtgacaccccgctgccccgcaatgaaatcgaaagccagttcaaggctttgctacagagtggtttcagcaagctcgacctggtcagccgggaagagtttgacagccagatggtggtgctggcccgcacacgtgcgcggctggagagcctggaggcgaaggtggctgaacttgaagcccggttgacgccaccttctgctgagtgaacgcgattgttgtgggagctggcttgcctgctcccacacttgttttgcgttgccgcccggatacgttctgtaaaacctcccccgccccgctccatcccacctcgtctacccttgaaaaaaccgcaggaagcggccctcccattcaaggaacgagcatgtccctcgccattgtccacagccgcgcccaggtcggtgtggaagccccagccgtcactgtcgaagtgcatatggccaatggcctgccgtctctcaccttggtgggtttgcccgaaaccgcagtgaaggaaagcaaggaccgcgtgcgcagtgccatcctcaactcggcgctgcaatatccggcccggcgcatcacactcaatcttgcgcccgccgacctgcccaaggacggcgggcgttttgatctggcgattgccctgggcatcctggcggccagtgtgcaagtgccggcgttgatgctcgatgacgtggaatgcctaggggaattggcgctgtccggcgaggtgcgcgcggtgaagggggtattgccggccgcgctggcagcgcgcaaggccgggcgcaccgtgatagtgccacgcgccaacgccgaggaggcctgcctggcgtcggggctgaaggtgattgcggtggaccacttgctgcaagtagtggcgcacctgaatgggcacgtaccgatcgagccctacaggtccgacggcttgctgtacgtgaacaagccttacccagacctgcgtgaagtgcagggccaactcgcggccaagcgagcattgctgatcgcggcggcgggcgcgcataacctgcttttcagcgggccaccgggcaccggcaagacgttattggccagccggctaccgggcttgctgccgccgttgagcgagcaggaagcactggaagtggccgcgatccaatccgtggtcagcctggcaccgctgagccattggccaaaccgcccgtttcgccagccgcaccactcggcatccgggccggcgctggtgggtggcggctcgaagccacaaccgggggaaatcaccctggcccatcacggggttttgttcttggatgagctgccagagttcgatcgcaaggtactggaggtgctgcgcgagccattggaatcgggacatatcgtgatatcccgcgcccgtgaccgagtgcgtttcccggctcgctttcaactggtcgcggcgatgaatccctgtccctgcggctacatgggcgaacccagcgggcgttgccggtgtacgccggagcagatccagcgttatcgcaacaagctatccggccctttgctggaccggattgatttgcacctgaccgtcgcgcgggaggccactgcgctgagccccactcaaccggcgggcgatacaacggccgatgcctcggtgcgggtagccgaagcacgcgagcgtcaacagcaacgccaggggtgtgccaatgcttttctggacctgccggggctgcgccagcactgcaagctgccaaaggtcgacgagggttggctggagaccgcctgcgagcgactgacactgtcactgcgggcggcccatcggctgctgaaggtggcgcgcaccttggcggacctggaccagatggacgccatcacccgtgaccatctgaaggaggccctgcagtaccgccccacatccgtgacttgagccttacgcaatatcaatgtgggagcggggttgctcgcgaatgcggagtgtcagtcacccatttgctactgatttaccgcattcgcgagcaagcccgctcccaccatttgattggtggtgcgtcagcgaaaccgatccacctcatggcgcaagcctgctgccaaggtctccagttccttggcggtaaccgccaggttcgacaccacttcacgctgctcgctgttggccagggcaatgctctgaaggttggcgctgagcaaagtcgcggtgctgctctgctcttgggtggcggtggtgatcgcagcaaactgctggccggccgagcgactctgctcgtcgatacgcgccagggccgaggccacgtcggcgttgcgcgacaggccttcctgcatcagcgcattgccatgctccatggtgctgatggcgttgccggtttcctgctggatgctctggatcatgccggagatttcatcggtcgcctggcgggtacgcgaagccaggttgcgcacctcatcagcgaccacggcgaaaccacggccttgctcaccggcacgggcggcttcgatggcggcgttgagcgccagcaggttggtctgttcggcgatggcggtaatcacgccgacgatcccgccgatttcctgggaacgctggcccagggtgttgatcacggcagcggtgctgttcagcgcggtggcgatatgttccagggacgatgaagcctcttgcatcgaggtacggccgatacgggtttgctgggcattctcttgagccaggcgctcggtgttgcccatgttgtcggcaatgttcagcgaggtagcactgaactcttccaccgcaccggccatgctggtgatctcgccggactgttgctccatgccttcgtaggcaccaccagacaagcccgacaacgcctgggcgcggctgttgacctgttcggcggcagtacggatatgcgacaccatggtcgacagcgcctcacccatctggttgaaactacgcgccaactggccgatttcgtcatggctggacacattgagccgcgcactcaaatcccccgcacccagggcctgagcctggcgtaccagctcgctcaatggcgccagcttgctgcgcaacagccacaccgtggcgcccactgccagcaacatcgccagcacactgccgatcaccaggcggctgccgacctcccaggtcacggcgcgaatctcagccttgggcatgctcgctatcaccgcccaagggccgccttcgaacggcaccgagacgctatagaaatcttcgttcttgtcactccagaaacggcctgcacccggctttctcgccagatcgagcatcacggcaatcgcctgatccggcgcttgcacgccagctggcggcaccagccagtgcttttgctcatcgagcagcgcgagggagccggtctggccaatgcggaagcgcttgaggttttcaaactgggcgttctgggcatcggtgtaatcgaaaccgatgaacagcacggcaatgacctggccactgctgtcacgcacggggctgtattgggtcatgtaggagcggtcaaacaacacggcacggccgatgtaggtctggccactcacaacgcgctggtaggccgcgccctgacggtcaagtacggtgccaatggcgcgattgccatcctgcttggtcagggaggtgctgacgcggataaagtcgtcgccgctgcgcacgaacaccgtggccacgccgccggacatctgcttgaactcatccacttcttcgaagttgttgttcagcacctcgttgcccagatagaggctcggcgtctgcacgccggccacggccacgggctggtccgcacgcacactcaagcctgcgccgaagcgcttttcaaacagcccgctcaaacgctgagtgctttcgcgcaaggtgctgaggaaggtgttgagttggtcggcgagcaaacgcgcctcgctggccaggtgttcctcgcgggtggcgaggttggcggagtcgagggtacgcaaggcaaagaccgtactgccgctgatcacgacagcgagaatcacggcgagtgcgaggcctaactgggaggcaatccgggcacggggttcagacatgacagctcctggccgaggccaggatcatcctgatctcatagcgctgctcggcaaattatctagtgggaaacgatgatgcacgatggttccaacccccttcttcggcggcatttggcaatacttgagcgaatcacaggggtatcccgcaaacgattgcactaacaactcgccgccactcaatcgaggcgttcaacctggggcaattccatcgccttgacttcaccttgaagaaattccgccagctgtcgcaaacgttccccacccgggcgggttttcggccacaccaggtagtagctttccccactggcgaccgccgtaggccacggcaggctcaagcgcccctgtgccacgtcttcggccaccatcagcaaatcacccatggacacgccatagcctcgggcggcggcgatcatgcccagctcaagcgtgtcgaacacctgcccacccttgagtgaaacctgagacgacagccccatgcgctgcagccagtaacgccagtcgcggcggtccggggtcgggtgcagcagttcggcggttgccaaccgcgtcacgtcccagggaccgtcgtccagcagattgggcgctcccaccgggatgagcatttccgcaaacagataactggcctcccagtccgccggaaagtgcccgttgctgagcaacaccgcgcagtcgaacggttcttgattgaagtccacttcatcgatgctcatccacgcactggtgagctgcacctcattgcccggctgcaaggcacggaagcgactcagccgcgccagcagccagcgcatggtcaaggtggacggcgccttcatacgcaggatgtcatcttcggcattcaaggtatggcaagcacgctccagggcagcgaagccttcccgtacgccaggcagcaacaaacgcgccgcttccgtgagctgcaacgtgcgaccgctgcgctggaacaatcggcaggcgaaataatcttcgagcgtacggatatgccggctgatcgcactttgggtaatcgacaactcctcagccgcgcgggtaaacgagtggtggcgggaggcggcttcaaaggcccgcaaggcgtaaagaggaggaagacgacgggacattctgaaagctccggctgcgcaatctggaaaccctaccagaatcgctcaagcatgagttttaatcatgccaacgatcgcttttatccttttgtgcaatgcgctgaatgcgccgagaatcaacccttccccaccttcctgactattcgagtgtgatgatcatgcaacatccggcacgtaccgaactctgggccattctgcggctatcggggccgttgattgcctcacagttggcgcacatgctgatggtgctgaccgacaccctgatgatggcgcgcctgagccccgaggccttggcgggcggcggcctgggcgcggcgagctattcgttcgtggcgattttctgcatcggcgtgatcgcagccgtgggcaccttggtcgccattcgccatggcgcgggcgatatcgacggcgccacccgcctgacccaggccgggctgtggctggcgtggttgatggcgctggcggcggcgttgctgttatggaacttgaagccggtactgctgatgttcggccagaccgaaaccaacgtgcaagcagccgggcaattcctgacgatcctgccctttgccctgcccggctacctgagcttcatggccctgcgcggctttaccagcgccatcggcaaggccactccggtgatggtgatcagcctgtgcggtaccgtggtcaactacctgctcaaccatgcgttgatcgaaggcatgttcggcctaccgaaactgggcctgatgggcatcggcctggtgaccgccatcgtcgccaatggcatggcgttggcattgatgtggtacatccgcagcaaccgcgcctacgccgcctacccgctgggcaccggcctgctgcgcctgaatacccactacctgcgcgagctgtggcgcctgggcctgccgattggcggcacctatgcggtagaggtcgggctgtttgcctttgcggcgttgtgcatgggcaccatgggcagcacgcaattggcggcgcaccagatcgccctgcagattgtgtcggtggccttcatggtgccggcggggatgtcctacgcggtgaccatgcgcatcggccagcattacggcgccgggcagttgctgatggcgcgcatggccgggcgggtcggcataggattcggcgccatggtgatgttggggtttgcggcggtgctgtggctgttctccgacccgctgataggactgttcctcgaccatgacgacccggcattccatgacgttatcgtgctggcagtgagcctgctggccgtcgctgcctggttcgaattgttcgatggcgtgcagaccatcgccatgggttgtatccgtggcttgaaggacgccaagaccaccttcctggtggggctgggttgctattggctgattggtgcaccgtcggcctggttgatggcgttcaccctgggctgggggccaaccggcgtctggtggggcctggcactaggcctggcgtgtgcggcggtgagcctgacctgggcgtttgaggcgaagatgaagcggatgattcggcaggagccggatgctgatgtcggactccgagcggcactgcctgactagcgagtgcacgcggttcatgtgggagctggctggcctgcgatagcggtgtgtcaggctaatcattattagctgaacgaccgctatcgcaggcaagccagctcccacatttgaaccactttgaaggcttagcccaacagcgcctgctggctttgcccgaacatcaggtattccaccagctccggcaacggcaacggcttgctgatcaggtaaccctggacctggtcgcacccaaacaagcgcaaaagctcaagttgctcaggggtttccacgccttcggcgaccacttccaggttgaggttgtgggccaggttgatcatggcgtgcaccagcttgcggttttcttcgcgctcttccatgccgccgacaaaactcttgtcgatcttcaacaaggcaatcggcaggctgttgaggtgcacaaacgatgaaaaaccggtgccgaagtcatccagggaaaaccgcacacccaaccggccaagggcatccatggtctgtttgaccaggtcgctgcggcgcatcacggcggtttcggtcagttcaaattccagccattgcgcttccacgccgcgctcggcaatcaggcggctgagggtggacagcaactggctgtcctgaaactggcgaaacgacaggttgaccgccatgtgcagcggcggcaggccgcgttcgcgcaggtcttgcatgtcgcgcagggctcgggagatcacccagtagcccaatggcacgatcaggccactctgttcggccagcggcacgaattcgctgggcggcaacaagccgcgctcgccgtggcgccagcgcaccagggcttcgaggccaacgatatggccgtcgtccaggtccagtcgcggctggtaatgcagctccaactcatcgcggcgcaaagcccggcgcagttcactttccaggtcggccaggctgcgggcgttgcggttgatgcgctcattgaagatatggaaggtgcagccctgggtgcttttggcctgctgcatggcgatatgggcgtgccacatcagcgggtcggcgccagcacgggctcgagcatgggccatgcccaggctgcaaccgatcaacaggctttcgccatccacccaatagggttcggccatcacttcggtgatgcgctcagccatccactcggcgcgctggggcgcccggcgggtatcgatcaacaaggcaaactcatcgctgcccaggcgcgccagttggtccccggcttcgagctggctcttgagcctcgacaccacttgcaggatcaaacggtcgcccgcctgatgaccgagggcatcgttggcatgacgaaaattgtccaggtccaggtgaccgagggccagaccacggccgtcgttttctgccaagcgcgcggccagcaaggtctggaagccctggcggttggcaataccggtgagcgggtcctgctcggccaggcgctgcaaggtgttctccagcacgccgcgctcgcgcacatggcgcaggcagcggcgcaatgtgtcggcatccaatgcatccagcaccaaccaatcgctgacacccagcggcgacaccaggggctcctgctccagcagcaatacacacggcaaactgcaccggcccgggccgggctgcaggctgggcgtggtcaataacacagcaccctggtcgtcatcgaacaggcggctcaccgagtcccagttgggcgcactgatcagcacagccccttcgcccatcggcgccaggcactcgcgcaacaacgctgcccactcgggctcatcggccagcagcagcaaacgcaagggttcgacaggcgtagacacgctaactccctagactctgcaaaatttcattagcggtgccattatgacgtgcggcctgacaatgacaaaggatgacaaatgataggtgttatcaaatacgcagactgtaaataatcgtctcggctattcctccacatcctgcggcaaagtagcaaaaccggcaaatttagatcgagtggtacgtcacaccgtcgttctatggcagcagaatctttccagcctgttaaaatgcccgcccttttgaacaacgactcctaaaattccgtatgtcccgactcaatccccggcagcaagaagccgtgaactacgtcggcggccctctattggtgctcgccggtgcaggctccggcaagaccagcgtgatcacccgcaagatcgcgcacttgatccagaactgcggcatccgcgcccagtacatcgtcgccatgactttcaccaacaaggcggcgcgggaaatgaaagagcgggtcggcaccctgctcaagggtggcgaaggccgtggccttaccgtgtgtaccttccacaacctgggcctgaacatcatccgcaaggagcatgtgcggctgggctacaagccgggcttctcgatcttcgacgagaccgacgtcaaggccttgatgaccgacatcatgcagaaggaatacgcgggcgacgacggcgtcgacgagatcaagaacatgatcggcgcctggaaaaacgacctgatcctgcccgccgaagccctggaagccgcgcgcaaccccaaggaacagaccgccgccatcgtctacacccactaccagcgcacgctcaaggcgttcaacgcggtggacttcgacgacctgatcctactaccggtcaagctattccaggagcacaaggacatcctggagaagtggcaaaacaaggtgcgctacctgctggtggacgaataccaggacaccaacgccagccaatacctgctggtgaagttgctgatcggcacgcgcaaccagttcaccgtggtaggcgacgacgaccagtcgatctacgcctggcgcggcgcccgcccggaaaacctgatgctgctcaaggaagactacccctccttgaaagtggtgatgctggagcagaactaccgctccaccagccgcatcctgcgctgcgccaacgtgctgatctccaacaacccccacgagtttgaaaaacaactgtggagcgagatgggccatggcgacgagatccgtgtgatccgctgccgcaacgaagacgccgaagccgagcgcgtggccgtggaaatcctcagcctgcacttgcgcaccgaccggccctacagcgactttgcgatcctgtatcgcggcaactaccaggccaaactgatcgagctgaagctgcagcatcaccaggtgccgtatcgcctgtcgggcggcaacagctttttcggacgccaggaagtcaaagacctgatggcctactttcggctgatcgtgaacccggacgacgacaacgccttcctgcgcgtgatcaacgtgccacgccgggaaatcggctccaccaccctggaaaagctcggtaactacgccaccgaacgcaagatctcgatgtacgccgccaccgacgaaatcggcctgggcgaacacctggacacgcgcttcactgatcgcctgtcacgcttcaagcgcttcatggacaaggtgcgcgagcagtgcgccggcgaagacccgatcagcgccctgcgcagcatggtcatggacatcgactatgaaaactggctgcgcaccaacagttccagcgacaaggccgcggattaccgcatgggcaacgtctggttcctgatcgaggcgttgaagaacaccctggaaaaagacgaagacggcgagatgaccgtcgaggacgccatcggcaagctggtgttgcgcgacatgctcgagcgccagcaagaagaggaagacggtgccgaaggcgtgcagatgatgaccttgcatgcgtccaagggcctggaatttccctacgtgttcatcatgggcatggaagaggaaatcctcccgcaccgctccagcatcgaagccgacaccatcgaggaagaacgccgcctggcctatgtgggtattacccgcgcacgtcagaccctggccttcacctttgccgccaagcgcaagcaatacggtgaaatcatcgactgtgcccccagccggttcctggatgaactgccgccggacgacctggcctgggaaggcaatgacgacacgcccaccgaggtgaaggccgttcgcggcaacaccgccttggcggatatacgcgcgatgctaaagcgctagaatcgactactttttaatctactttcggcgcacaacgcgccattagaggaagctttccgtggaagcactgcacaagaaaattcgcgaagaaggcatcgtgctttccgatcaggtcctcaaggttgacgcctttttgaaccaccagatcgacccggcgctgatgaaactgatcggcgacgaattcgccgcactgttcaaggattcgggcatcaccaagatcgtcaccatcgaagcctcgggcattgcaccggccatcatgaccgggctgaacctgggcgtgccggtgatcttcgcccgcaagcagcaatccttgaccctcacggaaaacctgctgtcggccacggtgtattccttcaccaagaaaaccgaaagcaccgtggcgatctccccgcgccacctgaccagcagcgaccgcgtgctggtgatcgatgactttttggccaacggcaaggcgtcccaggcgctgatctcgatcatcaagcaggccggcgcgaccgtagccggcttgggcattgtgatcgagaagtcgttccagggcgggcgtgcagaactggatgcgcagggttatcgggttgagtcgctggcgcgggtgaagtcgctggccggtggtgtcgtgacctttatcgagtaatcactatgtgggagctggcttgcctgcgatagcggagtgtcagtcgacgcattcgtagcannnnnnnnnnnnnnnnnnnnnnnnnnnnnnnnnnnnnnnnagcggagtgtcagtcgacagagatgtcgactgaaaggccctcatcgcaggcaagccagctcccacatggggttttgcgttgggctgtcagtgggcggtggcctgcaggccggcaagcagcaatcgttgatacaggtcttccttgatgccctccggcttatccaggcacatgcgctgcaaatgcttgggaaatgcctccggctccggcgcgtcgagtgccgccttgcccaactccagaatttccgtgagcttgaatttgctcttgagccagttcagcgctcgtaacaaatcccgctcttcatccgtgaagtcgctgcccagggggtattccgggaacaggcgacgatgcctggcctgaatcgcctgaagccgctctggcgtgttgtcggcaaaacgcggatccaactggaaatccttgggcagtttgccggccttttgcgcttgttcaatcaagtcgtgctggaacctggagtcggcgatgttcagcagcgcttcgatcaccttggcatccgtctgaccgcgcaagtcggcaatgccgtattcggtaatgacaatatcccgcaggtgccggggaatggtgcagtggccgtactcccagacgatattggaactgacctcccccgccgactcacgccagctgcgcaaaatcaggattgagcgtgcaccttccagcgcatgcccctgggccacgaaattgtattgcccgcccacgccactgagcacgcgaccgtcttccaactgatcggccacgccagcgccgagcaaggtgaccatgatcgcgctgttgataaaccgcgcatccaggcgctgcaggcgcttgagttcttcctgcccgtacagctcgttgatgtagctgatgcgggtcatgttgaatgcctggcgcttggcgtgggtcatttcctgcaggcgctggtaaaaactgcgcggtcccaggaagaaaccgccatggatcgacacgccgtcgggttgcgccgcgtcgtccagggtgcccgcgttggcctgcatctgggtcgccacatccgggtagaccttgcgccgcacaatcccggcatcggccaataccagcaggccgttgacgaacatctcgctgcaaccgtaaaggccacgggcaaacggctcaacgccgccttcgcggctgatcaacggcgcccactggtacacatccaggtcggtgagcaacaggcgataggcctcgttgtcggcctggcgcgccagcaaggcagcggtcagcgcatcgcccatggagccgataccaatctgcaacgtaccgccatcacgcaccagggtactggcatgcaggccgataaaatggtcctgaaagcccaccggcatattcggcgtggagaacaacgtggtgctgtctttttcatccagcaggtagtcgaactcatccatgcccagctcggcatcaccgggcatgtagggcaagtcgctatggacctggccaacgaccaggatggtctccccggtcgcgcggcgcttggcgatcatgggcatcaggtcgagggtgatatccgggttgcagctcaggctcaggcggtcgggatgctcgctgctactggcaaccagttgcgccaccaggttcaggccggcggcattgatgtcgcgcgccgcatggctgtagttgctgctgacgtaatcctgctgcgccgcggcgctgtggagcaggctgccaggctgcatgaagaattgctgcacacggatattcttcggcaggctgcccttgtgcaggtcggcgagaaagtctagttcggggtagtcgccaaacacccgttcgataaagggttcgagaaagcgtttctgcaagccatcccccatcgtcgggcgacccaggctcaacgcggtgtagatagtcagcgcccgctccggcaacttggcgatgcgccggtacagcgcgttgacgaacaaattgggcttgcccaggcccaagggcatgcccatgtggatatgcgccggcaaccgcgccagtacgtcgtcaactgcttgctcgattgaacacaactgcaccatccgactgctcccgaacattccatgaattggagttggaccgagcttgccgggtctttgctgcaatgaacagcctcaatacataattcgcaggcacaaaaaagccgctcgtaagcggcatttttggcgaagatcgatcggttacagcccggacatcttcttgatcgcacccttgaggtcgtcgtccgagcaatcagcgcaagtgcctttgggcggcatggcgttgataccggtgatggccttggccaggatgccatcgaggccgccttgatggtcggcgcgttctttccatgcggcggtgtcgccaattttcggcgcacccaacaggcccgtgctgtggcaggcattacagtgcttggcgatgatctcatccggggttttcgcgccgccgccgcccgctgccacggccacttccatgcccttgcattcctggccctggacgcaaacctgacccacaggctccaggcgcttggcaatgtcatcattggtcgcagcttgagcgctgacagcccatagggccagtacggttgctggtgcagccagcattttcataattaggttcacgcgttcaccctcaatggtggctattcacgcctgcggccacggtttcgcaggcggcgaaagtataacggttagcccgcccggccgaaacaaccctattaaataaagggagattcggcttcacggtgtacagctgcgggaacctctgcaacgctggcagggcgcctctattcttaaaagttcgcgggggtggctgcgctgattagtcgcgccggcacgtcgaacggattgcgaaaacgatggggcctggtactttcaaagtagtagctatcgccagcctcgagcacaaaagtttcaaggccgaccaccaactccaggcgaccttccaccagaatcccggtttcctcgccttcatgggtgagcatttcttcgcccgtgtcggcacctggcgggtagatctcggtgagaaaagcgatggcccggctcgggcgcgaccgccccaccagtttcatggtgacggcaccgtcggagatgtcgatcagctcattggctttatagacgatctgcgtcggtatttcctggaggacttcctcggagaagaactcgaccatggacatggggataccgcccagcaccttgcgcagggagctgatcgaggggctgacgctgtttttctcgatcatcgaaatggtgctgttggtgacgcccgcacgcttggcgagctcacgctgggaaagacctttgagtttacggatggattgcagtcgttcgccgacgtccaatgcaggagcctcctaggattcaggctttgttgtaattgagcgttatcatggcgacagcgttcagtatttacaacacttgggcctaaatcccggcctgctcggttcgttgctggcggctaagcgccgctatagagccttggcactcggcgtagattgcagaaaatctgatagggaatggtctcagcggccacagcaacatcactggcgaggatgtgcttgccccacagttccacagtggaaccaaggcccgcctggggcaagtcggtgaggtcgacacacagcatgtccatggaaacgcggcccagcagccggctgcgctggccagcgaccagcaccggtgtgccggtgggcgcatggcgcgggtaaccgtcggcatagcccatggcaaccacgccgatgcgcatcggcttgggggtgacgaacctggcgccatagcccaccggctcaccggccggcaattcacgcacgcagatcactttggactccagggtcatcaccggctgcaagcgcgccgcaatggcctggtcttcgccaaagggcgttgcgccgtaaagcatgataccggggcgcacccagtcgctggacacgctcggccagcccaatacagatggtgagttgcgcaggctgacctcagccgccaacccctggcgcgccgcctcaaacaccgttacctgttcgttgctgctgacgcaatcgagctcatcggcgcgggcaaaatggctcatcaatacgatcttcgccactttgccgctggccagcaggcgctgatacgcctcctggtaatccttggggtgcaggcccacacggtgcatgcccgagtccagcttcagccacactgtcagcggcttgctcaaatgagctttctcgatggcttccaactgccacaacgaatgcaccacgcaccacaaatcctgctcgatgatcagcggcaactcgtcggcttcgaaaaaaccttcgagcagcaacaccggcgcacgaatgccggcggcgcgcagttccagcgcttcctcgatgcacgccacggcaaacccgtcggcttgcgcctccagcgcctgggccacgggcaccgcaccatggccgtaggcatcggccttgatcacggcgagggccttggccccggtgacttctcgggccaattggtagttatggcgcagggcttggaggtcgatcagggcacgggctggacgcatggcggcaggcttctaggcagcaaagtcaataaaaaaccggtgccgaccaacaacgtcggcaccgggagagggatggttgttaaggcagcgcagccacgacagacagttctaccagaatctcgggttcgcacagcttggcttgcaccgtggcgcgggccggggcgacgcctttaggcagccacttgtcccataccgcgttcatcaaagcgaagtcggcgtcgatgtccttcaggtagatcgttaccgacaacaacctggacttgtcggtcccggcaaggtccagcaagcgctcgatattgaccagggtttcacgggtctgctgctcaatcccggcgctcatgtcgtcgccgacctgccctgccaggtacacggtaccgctgtggacaacgatctggctcatgcgctcattggtgagctggcgctggattgacatgttgtgcggactcctggtggttgccataacgggaaatatcgaggcctgcggcgctgatctgtggcgtttttttcgccatcaggtcggccagcaagcgaccggaaccacaggccatggtccaaccgagggtaccgtggcctgtgttcaggaacaggttcttgaacggcgtggcacccacaatcggtgtgccgtctggggtggtcgggcgcaggccggtccagaaactggcttgggccagatcgccgccctgaggataaaggtcgttgacgatcatctccagggtttcacgtcgccgcgggttcagcgacaggtcaaaaccggctatttcagccatgccaccgacgcgaatacggttgtcgaaacgggtgatcgcgactttgtaggtctcatcgagaatggtcgaggtcggcgccattgccgggttggtgatcggcacagtcagcgaataacccttgagcgggtacaccggcgccttgatccccaacggcttgagcagcttgggcgagtaactgccgagggccaggacatagcggtcggcagtttccagcttgccgtcgatcaacacgccgttgatgcggtcgcctgcgtagtccaggcgctggatgtcttgttcgaagcgaaattccacgcccagttgtttgcacatgtcgaccaggcgcgtggtgaacatctggcaatcgcccgtctggtcgttgggcaggcgcagggccccggcgaggatatcggtgacgctggccagggctggttcaacccgggcaatgccggcgcggtcgagcaattcgaacggcacaccggactctttcagcacggcgatgtccttggcggcgccatcgagctgggcctgggtgcggaacagttgggtcgtcccgaggctgcggccttcgtaggcaatgccggtctcggcgcgcaattcgtcgaggcagtcgcggctgtactcggacaggcgcaccatgcgttccttgttcaccgcatagcggctggccgtgcagttgcgcagcatctgcgccatccacaggtattgatcgatatcggcggtagccttgatcgccagcggcgcgtggcgttgcagcagccacttgatcgctttgagtggcacacccggcgcggcccatggcgaagcgtagcctggggacacctgaccggcgttggcgaaactggtttccatggcagcggcaggctgacgatcgaccaccacgacgtcgaaaccggcccgcgccaaatagtaggcgctggtcaccccaatgacgccgctaccaaagaccagaacgcgcatttttatatcctcatcgcgggcttggccgctgacgtgtgttattcgagcaatgatgagcgcagtgtaaaaaacaatcggcagtgcatttcactatataaatgcctatatttggcgacaattcttggcaaaaacccttttgacagaggcgtatcccctatgcgtaccaacacccagaccaagcgggagctggacaagatcgaccgcaatatcctgcgcatcctgcaaaccgacgggcgcatctcgttcacggagctgggggaaaaggtcgggctgtccaccacgccctgcaccgagcgcgtgcggcgcctggagcgcgaagggatcatcatgggctacaacgcacggctcaatccccagcatttgaagggaagtttgctggtatttgtcgagatcagcctggattacaagtcgggtgacacctttgaagaatttcgccgggccgtgctgaaactgccccatgtgctggagtgccatctggtgtcgggggatttcgactacctggtgaaagcgcggatttccgagatggcgtcgtatcgcaaattgctgggcgatatcctgctcaaactcccccatgtgcgcgagtccaagagctatatcgtgatggaagaggtgaaggagagcctgaacctgccgatcccggactgactcactgacacaacacggtcaactgtgggagctggcttgcctgcgatagcgtcggctcagaggcataggtgctagctgacccaccgctatcgcaggcaagccagctcccacagttttaaccgagtacatccgctagaccaacacctgccgggtgctcgccatgtactcatgaatctgcttctccacccgcggatgaatcagctcgaccggccggcgaccattagggcacggcaaggtcttggtggtgccgaacaggcgacagatcagcggccgctcgtcatacaccgtgcagcccttgggtcccaggtgcacgcagttcagctcgtccatcgccgcctcttgctcggcggcggtcttgcgcggcaggcgcgacatttcttcgggtgaagtggtcaccggcccgcagcagtcgtggcaaccggggacgcactcaaacgatggaatctggcgacgcagcgcgctgattttctgactgttgcaactcatcgaaacccataccgaacggcaaatagacgtggattctgacgcaaaacgccccgcgcagacagcgtcgtgcgaccactgtatcctgcgtcaaattttccagacagggaggttccccatgaccgccagcgcccggcacaccgcttcctactacgccgccagcagcgtgccgcaaccggattacccgacgttgacgggtgaggtaaacgccgatgtctgtgtgatcggcgggggtttctccggtcttaacaccgccctggaattggccgagcgcggctttcgcgtggtgttgctggaagcgcgcaagatcggctggggtgccagcgggcgcaatggcggccagttgattcgcggggtcggccacgggctggatcagttcacccaggtgatcggcagcgacggcgtgcgccagatgaagctgatgggcctggaagccgtggagatcgtgcgcgagcgtgtggagcgcttccagatcccctgtgacctgacctggggctactgcgacctggccaacaaaccccgcgacctgcagggcctggccgaggatgccgaagagctgcacagcctgggttaccgccacgaagtgcgcctgttgcaagccagcgagatgggcacggtcatcggctccgatcgctacgtaggcggcatgatcgacatgggttccggccacctgcacccgctgaacctggcactgggtgaggccgccgttgcccagcagttgggcgtggcgctgtacgagcaatcccaagtgacccgcatcgactacggccctgaggtcaaggtgcataccgcccaaggcacagtgcgcgccaagaccctggtactggcctgcaacgcctacctgaacggactcaacccgcaactgagcggcaaggtgctgcccgccggcagctacatcattgccacggagcccttgagcgaagcacaagccaccagcctgttgccgcagaacatggccgtgtgtgaccaacgcgtgacggtggattacttccgcctgtccgccgaccatcgcctgttgttcggcggcgcctgccactattccggacgcgaccccaaggatatcggcgcctatatgcgaccgaaaatgttgcaggtattcccgcaactggccgacgtgaagatcgactaccagtggggcggcatgatcggcatcggcgccaaccgcctgccgcagattggccgcctggccgatcaacccaacgtgtattacgcccaggcctatgccggccatggcctcaacgccacgcacctggcgggcaagctgttggccgaggccatcagcggccagcaacaggggcgcttcgatctgttcgcccaagtgccacacatcaccttccccggcggcaaacacctgcgttcgccgctgctggccctgggaatgctgtggcaccgcctcaaagaactgctctgatcaatcgcgccagaagggtttcaaaccctcacggcgcgcctgctcggcggtcagcccgatgtcgcgtaactgctcgcggctcaggtacagcagggccttgcgcgtatgacgacggcgccagaacagactccagcggccaggcgcctgggcagtgagcaccggctcctgccccgcttccagttcctgactgcgtaacgccagccgtacatcgctcatgccgctcatttgactgcccctcattggcccgttgccttgagtgatcagcatgcgtgggcggccagaaccatgacagattcagccaacttttattaaacccatacagagactgccgctgcgtggctgaatcctgtattttccctctatctgtactggtccctcgggagcgagcaccatgaccctttacgtcaacctcgccgaattgctcggcacccgcattgaacagggcttttatcgtccgggcgatcgactgccctcggtgcgggccttgagtgtggaacatggggtaagcctgagcaccgtgcagcaggcatatcggttgctcgaagacaacggcctggcgatgcccaagcccaagtcaggctattttgttccggtgggccgtgaactgccggcgctgcccgagataggccgcccggcccaacgcccagtggaaatctcccagtgggacctggtgctggaactgattcgtgcggtgccgcgcaaagacgtcatacagatgggccgcggcatgccggatgtattgtcgcccaccttgaagccgttgctgcgtagcctcgcccgtgtcagccgccgccaagacctgccggggctgtattacgacaatatccttggctgtatggagttgcgtgagcaaatcgcccggctgtcattggactccggttgccaactgagcgccgaagacatcgtgatcaccaccggttgccacgaagccctctccgccagcattcacgccatctgtgagcccggcgatatcgttgcggtggattcgcccagcttccacggcgccatgcagaccctcaagggcctgggcatgaaagccctggaaatccccaccgacccgctcactggcatcagcctcgaagccctggaactggcgctggaacagtggccgatcaaagtcatccagctcaccccaaactgcaacaaccccttgggctacatcatgccggaagcgcgcaaacgcgccttgctgaccctggcccagcgctttgacgtggcgattatcgaagacgatgtgtatggcgaactggcctacagctacccacgcccgcgcaccatcaaatccttcgatgaagacggccgtgtgctgctgtgcagctcgttctccaaaaccctggcgcccggcctgcgcattggttgggtcgcaccgggacgctacctggaacgggtgctgcacatgaaatacatcagcaccggctctacggccacacagccgcagatcgccattgccgaattcctcaaaggcgggcatttcgagccgcatttacgcaggatgcgcacccaataccaacgtaatcgcgacttgatgcttgattgggtcagccgctatttccccgctggcacgcgcgccagccggccccagggcagcttcatgctgtggatcgaactgcctgaagggttcgacaccttgaagctcaaccgcgtgctggtagaacaaggcgtacaggtggcggtaggcagtattttttctgcctccggcaaataccgtaattgcttacgcatgaactacgctgccaagccaacggcgcagattgaagaggccgtgcgcaaggtgggggcggccgcaggcaagatgctggaagagacggcggactgacctttcccgagcaattgccgtcatatgccacaaccgccctgacctggaagcagcttccttgatgattcgacggcttttaccgttttgcctgctaggcgccctggccctgggcggctgtgccacggtcgacaccccgcgcatccccagcgatgccctgccggcgaaggactcctcgttcggtcgctcgatccaggcccaggccgccccctaccaagggcgctcgggcttccggttgctgcccaacagcagtgaagccttcatggcgcgcgccgagttgatccgcaacgcccagaccagcctcgacttgcagtactacatcgtgcacgacggcatcagcacacgcatgcttgtggacgaactgctcaaggccgccgaccgcggggtgcgcgtgcgcattctgctggacgacaccactagcgatggcctcgaccagatcatcgccaccctcgccgcccatcccaaggtgcagatacgcctgttcaaccccttgcacctggggcgcagcaccggcgttacgcgcgccatgggccgggtattcaacctgtcactgcaacaccggcgcatgcataacaaactgtggctggccgataacagcgtggccatcgtgggcgggcgcaacctgggcgacgagtatttcgacgccgaaccgagcctgaatttcaccgacatcgacatgctcagcgtggggccggtggccgagcaattgggtcacagcttcgaccagtactggaacagcgccctgagcaagccaatcgatgacttcgtctcgaacaaaccctccaaagtcgacctcgccgtcgcccgtgggcgccttgaggcctcactggcccagtcccgccagcagaaccacgcgctgtataaccgcctgcgcacgtaccagacccagccccgcatggacatctggcgccgcgagttgatctgggcctggaaccaggcgctgtgggacgcaccgagcaaggtactggccaaggccgaccccgacccacgactgctgctgaccactcagctggcgccagagctggcgggggtcagccatgagctgatcatgatttcggcttacttcgtgccgggccaacctgggctggtctacctcacagggcgcgccgatgcgggtgtttcggtgcgcctgctgaccaacgccctcgaagccacagacgtgccggctgtgcatggcggttacgcaccgtatcgcaaagcgttgctggagcacggggtgaagctctatgaactgcgcaggcaacccggcgaccccagcgcaagcagcggcccgcatctgtttcagcatggcagctggcgcggctcggactcgagcctgcacagcaaggcgatgatttttgatcgagaaaagtcgttcatcggctcattcaatttcgacccgcgctcagtgctgtggaacaccgaagtcggcgtactggtggacagccccgaactggccgaacacgtacgcaacctggcgctggaaggtatggcgccagcgttgagctatgaggccaaattgcaagacggccaggtggtgtgggtgacagaagacaacggccagatgcacaccttgacccgcgaaccgggcagttggtggcggcggttcaacgcctggttcgccaccagtgttggcctggaacgcatgctctaaaacccctgtaggagcgcgcttgctcgcgaaaaacgccaacgataacgcagcgcatctggtttaacgcggcgccctccggtttttcgcgagcaagctcgctcctacaatgggttgcatttcgagatcaggccggctgcgcggcgccgaatgccccctggcgcagcaacagcactaccaaccccaacgccccggccgccatcagcagcggcagcgcatgcccgctgatccactggctgcccgctcctgccaccagcggcccgatcaggcagccaatgccccacagctgcgccacgtgagcgttggcacgcaccaacgcatcgtcgcggtagcgctcgccaatcaaaatcagcgacaaggtaaacaaaccgccggcactggcgccgaacagcacccacaccggccagatcagcaacgtgtgcatcaataacggcaccgccaggctcgacgccagcaacagcagcgcacaggccaggaacaaggtccgtcgcggcaggtagtcggccaacgcgccaataggcaattgcagcaacgcatcgcccaccaccaccgtactgaccatcgccaaggcgatctcggcggtaaaaccctgttgcaggcagtacaccggcaacaacgtcaggatcatcgcttcgaaggctgcgaacaacgccacggcccaggcaatcgccggcaggcccaggcaaaagcgccacaggtcgccaaacgtcacgctgaacgaatccgccgtcggtgccccggtacgtcccagcaacagcagcggcgccaccaccaaaaggcccgcgccgacccagaaaccgtagtcatggtcggtgccaatcaggcccagcagcaacggccccgagagctggctcaaggcatagctgcagccatacagcgccaccaggcggccacgccattgctcgaccaccaattggttgatccagctttcgccaaggatgaagacgatggtcaggatcaccccgatcatcagcctgagcaccagccacaccgggtaactgggcaggatcgccagcaagccgatggacaccgcaccggcccacaggcacaggcgcatcaggttggcagtgccgagccaggacgccatacggctggagaccttggcccccagcagcacgccgaacgccggcatcgccgccatcacgccaatggcgaaactgccatacccccagccttcaagacgcagggacaccaacggcatgctgacacccagggccaggccaacgctgagtaccgaggccagcacggcgaaataagtcgcccaacgcattgccacgctcctgtggataattctggtttgcaaaacgaactgtaggagcggacctgtgtgggggctggcttgcctgcgatgcagacgcctcggtgtgtcagccacacctcggagatgctatcgcaggcaagccagctcccacacaagctcgctcctacaggaggatcagcagtgttgcttagagcttgatccaggtcgctttcagctcggtgtacttatcgaatgcatgcagtgacttgtcgcggccattacccgactgcttgaaaccaccgaacggtgcggtcatgtcgccgccgtcgtactggttaacccacacgctgccggcacgcagagccttggccgtcaggtgcgccttggagatatccgccgtccacaccgctgcggccaggccgtattgggtgtcgttggcgatggcgatggcttcttcagcgctgtcgaaggtgatcaccgacaggactgggccaaagatctcttcctgggcgatcttcatggcattggtcacgccgtcgaaaatcgtcggctcgacgtaggtgccgccggactcttccagggtgcgcttgccacctgcgaccagcttggcgccgtcggcgtggccggcttcaatgtacgaaagcacggtattcatctgctgcgtatccaccaaggcacccacagtggtggctgggtccagtggattgccgggtttccaacccttgagggcttcgatcaccagcggcaggaaggtgtccttgatcgaacgctcgaccagcaggcgcgaaccggcggtgcagacttcgccctggttgaaggcaatggcactggcggcggattcggcggccgcttgcaggttcggcgcatcggcaaacacgatgttcgggcttttgccaccggcttccagccagacacgcttcatgttcgactcaccggagcggatcaacagttgcttggcgatcttggtggagcccgtgaacaccagggtatcaacatccatatgcaccgccagggcgttacccacggtgtggccatagccaggcagcacgttgaacacgcctttaggaataccggcctctacggccagcgcggcaatgcggatggcagtcagcggggatttttcggacggcttcaggatgacagagttaccggtggacagcgccgggccgagtttccagcaggccatcatcagcgggaagttccacggcacgatggcgccaacgacacccacgggctcgcgggtcaccaggcccagttgatcgtggggcgtggcggcgacttcgtcgtagatcttgtcgatcgcctcgccgctccagctcagggcttgcgccgcgccggggacgtcgatgttcagggaatcgctgatgggcttgcccatgtccagggtttcgagcagcgccagctcttcggcattggccttgagcagcgcggcgaaacggatcatgacggacttgcgcttggccggcgccaggcgcgaccacacgccggaattgaaagtggcacgcgcattttccacggcgcgctgggcgtcgctggcatcacagctagcgacagtggccagcaagcgcccatccaccgggctgatgcattcgaaggtgtcgccggaaacggcggcggtgtactcgccattgatataggcgcggccttcgatcttcagagccttggcgcgttgttcccagtcggcacgggtcagggtggtcatgcgagtgtcctcctcttattgaatacaagggcctgggaggtttatcccggcgccatcacaaatgcttgcccgaccagcctgctgttcggctcaaggcagctgccaccctaaaccagcggctggggatgtttcaatatatttgacataacggcggcaaacgcccttgcgatgttcattttaataaacatagactttgggctctccaaccgcaggccagacgggaaatgcacatgagcatccaggacatcgtcgatttcagccaagccaacaccgcccccgaacgttaccgccctgccgccgagaaaatcctcaagggcgatcccgagcagacactctacaaccactacaacagcccatgcggccagatgaacgccggcgtctgggaaggtgaagtgggccagtggaaggtcaactacaccgagcatgaatactgcgagatcgtgcaaggcgtgtcggtgttgcgcgataccgagggaaatgccaagaccctgcgggccggcgaccgctttgtgatccctgccggcttcagcggtacctgggaagtgctggaagcgtgccgcaagatctacgtggtgttcgaagagaaagcctgatcattgattgatcgacaacgggacgctgagcgtccgagacggcattcccacgcagagcgtgggaacgatcagcagagcgtgggaacgatcatcccaggcaaaaaaaagcccgcatcgtgagatacgggctttttttcacaaggaagaaaatcaattacttgattttgccttctttgtagatcacgtgcttgcgaacgcgcgggtcgaacattttcttttcgagcttgtccggggtagtacgcttgttcttgtcggtagtgtagaagtgaccagtaccggcgctagagatcattcgaatcaattcacgcatgatagagctccttagatcttgccagcggcacggatttcggccagcacgacagtgatgccacgcttgtcgataatacgcatgcctttagcagatacacgcaggcgaacaaaacgtttctcttcttcaacccagaagcggtgatgctgcaggttcggcaggaaacgacgacgggttttgttatttgcgtgggaaatgttattcccagtcaccggacccttaccggtaacttgacagactctcgacatgcctcagccctctaaaaccacatgcccaacccggcatgggttggccgcttaatctctcagtcatttggcgccaggcgccgcgtttctttagggtcttaccggctacacctacagtgaaggaaccgggcccctagaaaagagcgctgctttataccagaaagaccccagtgcaacaacaacctgtgtatttttagcagcgtaaatcttggccacaagtgcctgaaccgctgccaggaggggccgctgtaacagccgaccgctcgtcgcacagaatgatttacaacgcctgcggtcacagggaagtgcacggcgcaacacgcgcaggcgccatcaaaacagcatttgcgccaaaagcacaggcaaaaatgggctagtcatttatcaatcagacctctacggtaggctttttccagactgcactcgcagatgggccttcgatctgcacaggaaaccgaatatgcgcctcgctgccctaccgctattgcttgcccctctctttattgcgccgatggccgttgcggccaccaatttgagcgtttgcaccgaggccagccccgaagggttcgatgtggtgcagtacaattcgctgaccaccaccaacgcctcggccgatgtgctgatgaaccgcctggtggaattcgacgcggccagtggcaagttggtacccagccttgcagacagttgggaagtgtcgcccgatgggctcacgtacaccttcaagctgcatcccgatgtgaaattccatcgcaccagctatttcagcccaagccgcaccctgaccgccgaagacgtgcgcttcagcttcgagcgcatgctcgacccggccaacccgtggcacaagatcgcccagagcggctttcctcacgcccaatccctgcaattgcctacactggtcaagaaaatcgacgcccttgacccgctgaccgtgcgctttaccctcgaccacgccgactccaccttcctaccggcgctgagcatgggttttgcctcgatctacccggccgaatatgccgacaaactgctcaaggccggtacacccgaaaagctcaacagccagcccatcggcaccggcccgtttgtgttcgtgcgtttccagaaagacgccgtggtgcgctacaaggccaacccggactacttcgccggcaaaccggcggtggataacctgattttcgccatcaccccggacgccaacgtacgcctgcagaagctgcaccgcgatgaatgccagatcgccctgtcgcccaagcctctggatgtgggcgaagccgaaaaggacccagcactcaaagtcgagaaaaccgctgcgttcatgaccgcattcgtcgccatcaacagccagcacccgccgctggacaagcccgaagtacgccaggcaatcaacctggcctttgataagggcagctacctcaaggccgtgttcgaaggcaccgtcgaagcggccaacggtgtctacccgccgaatacctggagctatgccaaagagttgccaggctacccgcaggacctcgccaaagccaaggcgctgctgggccgcgccgggctcaaggacggcttcaagaccacgatatggacccgccctaccggcagcctgctcaaccccaacccgaacctcggcgcccaactgttgcaggctgacctggccaaggttggcatccaggccgagattcgcgtgatcgaatggggcgagttgatccgccgcgccaaggccggcgagcacgacttgctgttcatgggctgggccggcgacaacggcgacccggataacttcctgacgccgcagttctcctgtgccgcggtaaagtccggcaccaacttcgcccgctattgcgaccccactctggataagttgatcagtgccggcaaaaccaccagcgagcaaggcgtgcgcagcaagctgtatcagcaggctcaggcgcagatccagcaacaggcgctgtggttgccgttggcgcatccgacggcgtttgccttgacccgcaagaacatcgaggggtaccaagtaagccctttcgggcgccaggattactcgaaggtcagcctcaaaccctaaggaacactcccacctgtaggagcgagctcgctcgcgaaaatcgacaacgatgacgcggcaagcctgacgccccgcggggttctcaggtttttcgcgagcaagctcgctcctacagacagaggcggggttattacagccaaccgtattcagccatcgacaacggatcaccatcgcccacgatgatgtggtccagcacacgcacatccaccacatccagcgccttttgcagcaatttggtcaattttcgatcagccgcgctgggctccgcgctccccgacgggtggttgtgacacaggatcaacgccgccgcgttgtacgccaaggcgcgcttgaccacttgtcgcggatagacaatcgcagcgtcgatggtgccttggaacatggcctcgaaccccagcacccgatgcttggaatccaggaacaggcaaccgaagatctcatggggctcatggcgcagcagtgccttgaggtactcgcgcacggccagcgggctttccagcaccgagtcagcccgcaagcgctctgccaggtggcgccgggacatttccagcaccgcctgcagttgagcgaacttcgccgggcccagccccagatgctggctaaacagcgtctggctggcctccagtaacgggcgcaggccaccgaattgcgccaacagatggcgcgccaggtcgaccgcacttcggccggcaacccccgtacgcaaaaagatcgccaacagttcggcatcggacaggcttgccgcgccgccttccaacagcttctcccgcggacgctccgccacgggccaatcacgaatactcatcccacctccctgtatctgctccgctgttgcccggcgggcgctgtgttatcgtagggccctcttttttgccggcgatttcacctggggaggggtcatcgcaggcgtcactgaactggcatcactgaactggaaaggcaaaccaatgcagcgtctgtatcggaaacgcatcgttctcggcgtcggcggcggcattgccgcctacaagagcgcagagttggttcgcaggctcctggaccagggcgccgaagtgcgcgtggtcatgacccgtggtggtagcgagttcatcaccccgctgaccatgcaggccctgtccggccacccggttcacctcgacctgctggacccggcagcagaagccgccatgggccatatcgaactggccaaatgggccgacctggtgctgatcgccccggccaccgccgacctgatcgcccgtctggcccagggcattgccgatgacctgctcaccaccctggtattggccaccgacgccaccgtcgctatcgcaccggccatgaaccaggccatgtggcgcgacccggccacccaggccaatacccaactcctgcaaacccgtggcctcaaggtgttcggcccggcgtccggcagccaggcctgcggcgacgtcggcctgggccgcatgctcgaagccacggacctcgcgcagtgcgccgccgagtgcttccagcacctggccctgaccggcaagcacgtgctgatcaccgccggcccaacccaggaaaacatcgacccggtgcgctacatcaccaaccatagctcaggaaaaatgggcttcgcgttggcagaagctgcggtcgaagcaggcgcacgcgtcacactgatcaccggtcccgtgcatctgcccacccctgatcgcgtcacgcgaatcgacgtagtcagcgctcgggacatgttggcggcctgcgaagccgccatcccctgcgacctgtttatcgcctcggcagcggttgcggattaccgcccggaggtcgtcgccccgcagaagctcaagaaagaccctacgagcggcgacggcctgctcctgcaaatggtgcgtaacccagacatcctggccaccatcgctacccgtccagaccgcccgttcagcgtcggcttcgctgccgagaccgagcacctgctggactacgccgcacgcaaactgaaagacaaaaacctcgacctgatcgttgccaatgatgtcgccaacccgagcatcggcttcaacagcgaggaaaatgcgtgcagcgtgatcgaccgcgaactgcacgccacccttttcgcccagaccagcaagggcaagattgcccgccaactgatctcttttatcgcccaacggctgaaccaggtttaatctccatgcacgctttgcaagccaagatcctcgatccacgcctcggcaacgagttccccctgccggcctacgccacgccgggctccgccggcctggacctgcgcgccatgctcaaggaggacaccgtccttgagccgggccagaccatcctgattcccaccggcctgtcgatctatgtcggcgatcctggcttggcggcgctgatcctgccgcgctccggcctgggtcacaaacatggcatcgtgctcggcaacctggtcggcctgatcgattcggactaccagggcgagttgatggtgtcgtgctggaaccgtggccagactgctttcaacatcgccatcggcgagcgcatcgcccagttggtactggtgccggtggtgcaggcgcattttgaattggtgcaggaatttgacgaaacccaacgcggcgcaggcggttttgggcattccggcagtcactgactaagctgaacgtggccggacgccatcgtccgcccccgcgccaccgcccggcttttcaggatgaagaatgcgcggaaataatcatcgagatttctctaatgaaatcaaaggactacgtaaaaacaatgctaaagccagagcgccgatggcatttttacaccacgaactctctgccgaaaacgccgtcatacccttcagtttgagcctgccggccagccacatcaggccagccttgccccctttcagatggagtttcccccgcgatgagtaccgcagcccgcgtagccccgacctttcccgacagcatttttcgcgcctatgacatccgtggcgtggtccccaagaccctgaccgccgaaaccgcctactggatcggccgcgccatcggctcccagagcctggcccaaggcgaacccaacgtttcggtaggccgtgacggccgcttgtccggcccggagttggtcgagcaactgatccagggcctggctgacagcggctgccacgtcagcgacgtcggtctggtaccaacccccgcgctgtactacgccgccaacgtactggcgggcaaatccggggtcatgcttaccggcagccacaatccgtcggactacaacggcttcaagatcgtcatcgctggcgacaccctggccaatgaacagatccaggccctgcacacccgcctgaagaccaacgacttgaccagcggcaccggcagcatcaccaaggtcgatatcctccagcgctactccgatgaaatcacccgcgacgtcaagctcgcccgccgcctgaaagtcgtggtggactgcggcaacggcgcagcgggcgtgattgccccgcaactgctcgaagccctgaactgcgaagtgatcccactgttctgcgaagtggacggcaacttccccaaccatcacccagacccaggcaagccggaaaacctggtggacctgatcgccaaggtcaaggaagtgggcgccgacgtcggcctggccttcgatggcgacggcgaccgtgtaggcgtggtgaccgaaaccggcgagatcgtgtttccggaccgcctgctgatgctgtttgcccgtgacgtagtggcgcgcaaccccaacgccgagatcatcttcgacgtgaaatgcactcgccgcctcacgccattgatcaaggaatacggcggtcgcccgctaatgtggaagaccggtcactcgttgatcaaaaagaaaatgaaggaaaccggcgcgctgttggccggcgaaatgagcggccacgtgttcttcaaggagcgctggttcgggtttgacgatggtatttacagcgccgctcgtctgctggagatcctcagcaaggagaaatccacggcgcaagagctgtttcagaccttcccgaatgatatttctacgcctgagatcaatatccatgtgaccgaggagagcaaattcagcatcattgacgcattgcacgatgcgcaatggggtgaaggcgccaacctgaccaccattgatggtgtgcgagtcgattacgccaaaggctggggcctggttcgcgcgtccaacaccacaccggtgctggtcctgcgtttcgaggcggataccgaagcggagttgcagcgcatcaaggacgtgttccacgcccagttgaaacgtgttgcccctgatctccaattaccgttctgattttttgcccggagccctgaatgaccctcgaacgcgaagccgctgccaacaccgccaaggtcctgtccgaagcgttgccttatattcgacgctacgtcggcaagacgctggtgatcaagtacggcggcaatgccatggaaagcgacgagctgaaaaccggctttgctcgcgacatcgtgctgatgaaggccgtagggatcaacccggtggtcgttcacggcggcggcccgcaaatcggcgacctgctcaagcgcttgtcgatcgagagtcacttcatcgatggcatgcgtgtcactgacgcgcaaaccatggacgtggtggaaatggtcctcggcggccaggtcaacaaagacatcgtcaacctgatcaaccgccacggcggcagcgccatcggcctgaccggcaaggatgcggagctgatccgtgcgaaaaagctcaccgttacccgcaagacacctgaaatgacccagccggaaatcatcgacatcggccaggtgggtgaagtggtgggcgtgaacaccgacctgctcaacctgctggtcaagggtgacttcatcccggtgatcgcgccgatcggcgtgggcgccaatggcgagtcgtacaacatcaacgccgacctggtggcgggcaaagtggcagaagcgttgaaggctgaaaagctgatgctgctgaccaacatcgccggcctgatggacaaggaaggcaaggtactgaccggcttgaccacccaacaggtggacgacctgattgccgacggcaccatctacggcggcatgctgcccaagatccgctgcgcgctggaagcggtgcaaggcggcgtcggcagctcgctgatcattgatggccgcgtgccgaatgcggtgctgctggaaatcttcacggataccggtatgggcacgctgatcagtaaccgcaagcgttcttaatcgccgcaaagcaaaaggccccgctcaattgaattgagcggggccttttgtttgtacacagttcaaatgtgggagctcgcttgcctgcgatgacggcagtacattcaaaaatgcaccgcctgacacaccgctatcgcgggcaagcctgctctcacaggggtcagtgtcagacgccgaactgctcgcggtatgcacgcacagctggcaaatgctgcttgagctgcgggtcatcttccaggaactgcaacacctggttcaacgacacgatgctcaccaccggaatgccgaaatcacgctccacttcctggatcgccgacaattcaccgttgccgcgctcctggcggttcaaggcgatcagcacgccagcagccttggcgccgtcctgggatgcgatgatctgcatcacttcacggatcgcagtgcccgcggtgatcacgtcatcgatgatcagcacatcgccggtcaatggcgcgccgaccaggctcccgccttcaccatgggccttggcttccttacggttgaaacaccacggcaagtcctgcccgtgatgctccgccagggcgaccgccgtcgccgcagccaggggaatacccttgtaggccgggccaaagagtacgtcgaaggaaataccgctctcaacgatggctgccgcatagaaacggcctagctgagccagggccgaacctgagttgaacaggcccgcattgaagaagtacgggctggtgcgcccggacttgagggtgaactcaccgaagcgtaaaacgccgcgatcgatggcaaaacgaatgaaatcgcgctgatacgcctgcatgaaaaaagcctcagataccacggatttagctaattgggtggacggcgtgtatcatacacgcacgcgatttttggggccatttatgcggatcatcagtgtgaacgttaatggtattcaggctgcagtcgagcgtggtttgctcagttggctgcaagcacagaatgccgacgtcatctgcctgcaggacacccgtgcctccgcctttgaactggacgacccagccttccaactggatggctacttcctttatgcctgcgatgccgaagtgcccacccaaggtggcgtggctttgtactcgcggttgcaacccaaggcggtcatcagcggcctcggcttcgagacagccgaccgctacgggcgttacctgcaagccgatttcgacaaggtcagcatcgcgaccttgctgcttccttccgggcagaacggcgatgaagacttgaaccagaaattcaagctaatggacgatttcgcccgttacttggataaacagcgacgcaaacgtcgcgagtacatttattgtggctcgctgtacgtggcgcaacagaagctggatatcaagaactggcgcgacagccagcaatccccaggtttcctggcgccggaacgcgcctggatggacgagattgtcgggaacatgggctatgtcgatgccctgcgcgaagtcagccgcgaaggcgaccagtacagctggtggccggataacgaacaggctgagatgctcaacctgggctggcgtttcgactaccagctgctgaccccgggcctgcgccggttcgtgcgcagtgcacgcctgccgcgccagccgcgcttctcgcagcacgcgccgctgatcgtggactacgactggacattgaccatctgaggtcattctccaggcacaaaaaaaccgacagtgatgtcggtttttttgtggccgctcggttacttgaccaggcgccaggtccacggataccggtaggcaatgcctttgttggccttgataccggcgatgatcgtgagtatcaacgccccgatcaccagcacggtcatcagcaagaagccgaccaccacgaagcccagcagcaggcacaccagccaggcgatcgccacggtgatctggaaattcagcgcctccttgccctggtcatcgacgagcgggtccatgtccttcttgaactgccacaggatcaacggccccagcaagctgccgaaggggaataccaaccccaggaatgccgcgaaatgacacaacattgcccactggcgtacttccttggacggtgccggaaccggcaactggctgtcattcatggcgcttctccttggggccggctcagtcagccagcgcggcgttctgcaattcaaaaatttcggtcatgcccttctgggccaaggccagcatggcgttcagctcagccggctggaatggcgcgccttcggcagtgccctgcacttcaatgaaaccaccggtgctggtcatgaccacgttgaggtcggtctcggcggccgagtcttccaggtagtccaggtccagcacaggctcgccctggtacatgccaaccgacacagcggcgatcatctgcttgagcgggtcacccgctttcaggccgccacgcttcttgatcactttcaaagcgtcaaccagggccaccatggcgccggtaatggatgccgtgcgggtaccgccgtcagcctggatcacgtcgcagtcaacatagagggtgacgtcacccagcttggacatatccaaagcggcacgcagggaacgaccgatcaagcgctggatttccagggtgcgcccgccttgcttgccacggctggcttcacgctggttacgctcgccagtggcgcgcggcagcatgccgtattcagcggtcaaccaaccctggccctggcccttgaggaagcgcggcacgccgttttcgacgctgacagtgcagatgaccttggtatcgccaaactcgaccagtacagatccctcggcgtgtttggtgtagttgcgggtgatgcggatcgagcggagctgatcggcagcgcgaccacttggacgtttcataggggatacctgtactgaggacgaaaaactgccgagcattatagagccgcaagccggttcgaggcacttctaaaaaatccggttactaatgcccgtgtttgggtgccccctcccactgcgctacaatcctgcgcctccagacggtaggagcgagcttgctcgcgaaaaacgtcaacgattacggggccttcctgattcaacgcggtgcccttgcgttcttcgccagccagctcgctcctacaggtcggcctggtcaatttctatttatccaacgcgaggtacctccatggtgcacagcatgaccgccttcgcccgtgtcgaaaaagccggggcccaaggcaccctcagctgggaactgcgctcggtcaacagccgttacctggagccgcacctgcgcctgccagagtcgttccgcgacctcgaaggagcggtgcgtgaagcgctgcgccaggggatctcccgtggcaagctggaatgcaccttgcgctttaccgaagaaaccaccggcaagccgctgcaggttgaccgcgaccgcgccgcccaactggtggccgcggccgaaaccatcgctggactgatcaagcagccggccgcattgaaccctctggaagtattggcctggcccggcgtgctggtggccgacgcggccgacccgcaggccctgaatgccgaagccctcgccctgttcaaccagggcctgaaggaactcaaggccggccgcgagcgcgaaggcgccgagctggcgcgcctgatcaacgagcggctgacgtcgatcgaagccgacgtggtgaccctgcgcgaactggtaccgcagatgctcgccacccagcgccagaaggtcctcgaccgctttaccgacatgaaagccgacctcgacccgacgcgcctggaacaggaaatggtcctgctcgcgcagaagagcgacgtggccgaagaactcgaccgcctgagcacccatatccttgaagtgcgccgcgtactcaagtcgggcggtgccgccggtcggcgcctggacttcctgatgcaggaactcaaccgcgaagccaatacactgggctccaaggcgttcgacccgcgcagcaccacggcggcggtcaacctcaaagtgttgatcgagcaaatgcgcgaacaagtacagaatattgagtaaggcaccctccatgacccacagcaccggcaccctttacatcatttccgccccttcgggcgcgggcaagagcagcctggtcaaggccttgaccgacgccgacgagcagatccgcatttcggtctcccacaccacccgcgccatgcgcccgggcgaggtagacggcgtgcactatcacttcgtcgagcgtaccgagttcgtcaagatgatcgaacacggtgactttctcgagcgcgccgaagtgttcggcaatctctatggcacctcgcaaagccacctgcagcagaccctggacgaaggccacgacctgatcctggaaatcgactggcagggcgccgaacaagtgcgccaactgatgcccaaggcgcgctccatcttcatcctgccgccctcgctccaagccctgcaccagcgcctgaccaaccgcggccaggacagcgacgagatcatcgaggggcgcatgcgtgaggccgtcagcgaaatgagccactacgtcgactacgactacctgatcatcaatgatgactttgcccacgcactggacgatttgaaggcgattttccgcgccaaccaactgcagcaaaagcgccaacagcaacgtttcggcaaattactcgccgaattgctcggctgattggctcttcccaaaacagctgcaagggccttacattggcacttgtagcggttttgcgaaggcctgccaaaaatcagcgcttccctaaacgctggtgattttttaaactgctcagtccgctcgcccaaccgggcagcgcgcatcttgcattcgctccgaggaataccatggcccgcgtaaccgttgaagactgcctagaacacgtggataaccgctttgagctggtcatgctctctaccaagcgtgcccgtcaactggccactggcggcaaagagcccctggtccagtgggaaaacgacaagcctaccgttgtagccctgcgtgaaatcgctgaaggcctgatgagctacgagttcatcgccaacgccgaaatcgttgaagacgaaccgctgtttgcagcgttcgaaggcgagtccaacgaggacgtctaagcctatgcctggtcgacgtagcacggcgcggggtcacagccatcggcaggagttcacactttgccgagcatagacgccctcgccgatcgcttatcggcctacctcggcgccgaccaggtcaacctggttcgccgagcgtatttctacgccgaacaagcccacgacggccaacgccgccgtagcggcgaggcgtatgtcacccatcctcttgcggtggccaatattcttgccgacatgcacatggatcatcagagcctgatggccgcgatgctgcatgacgtgatcgaagacaccggcattgccaaggaagcgctcagtgcgcaatttggcgaaaccgtggccgaactggtcgacggggtcagcaagctgacccagatgaacttcgagaccaaggccgaagcccaggcggaaaacttccagaaaatggccatggccatggcccgagacattcgggtgatcctggtcaagctggccgaccggctgcacaacatgcgcacgctggaagtgctgtccggcgaaaaacgccggcgcatcgccaaggaaaccctggaaatctatgcgcccatcgccaaccggctgggcatgcacgccattcgtatcgaattcgaagaccttggctttaaagccatgcaccccatgcgctcggcgcgcatctaccaggcggtcaagcgcgcacggggcaaccgcaaggaaatcgtcaacaagatcgaagagtccctgagccattgcctggcgatcgacgagatcgagggcgaggtcagcggccggcagaagcacatctatggcatctacaagaagatgcgcggcaagcgtcgcgccttcaacgagatcatggatgtgtatgcgttccggatcatcgtcgacaaggtcgatacctgctaccgcgtactaggcgctgtacacaatttgtacaagcccctgccaggccgcttcaaggattacatcgcaattcccaaggccaacggctaccagtcgctgcataccaccctgtttggcatgcacggcgtgccgatcgagatccagatccgcacccgcgaaatggaagagatggccaacaacggcatcgccgcccattggctgtacaaatccagcggcgacgagcagcccaaaggcacccatgcccgtgcgcgccaatgggtcaagggcgtgctggaaatgcaacaacgtgccggcaactccctggaatttatcgaaagcgtgaagatcgacctgttcccggacgaggtctacgtgttcacgcctaaaggtcggatcatggagctgcctaaaggctccacggcggtcgactttgcctacgcagtgcacaccgatgtcggcaacagctgcatcgcctgtcgcatcaaccggcgcctggccccgctgtccgaaccgctgcaaagcggttccacggtggagatcgtcagcgcaccgggcgctcgcccgaacccggcctggctcaactttgtggtcaccggcaaggcacgtacgcatattcgccacgcgctgaaattgcagcgccgctccgagtccatcagcctgggcgaacgcctgctgaacaaggtactcaacggcttcgacagcgccctggacaagatcccgcaagagcgcgtgcaagcgatgctccacgagtaccgccaggaaaccatcgaagacctgttggaagacatcggcctgggcaaccgcatggcctacgtggttgcgcgccgcctgctgggcgaaggcgaacagctgccgagcccggaaggcccgctggcgattcgcggcaccgagggcctggtgctcagctacgccaaatgttgcacgccgatcccgggcgacccgattgtcggccacttgtccgcaggcaaaggcatggtggtgcacctggacaactgccgcaacatcaccgaaatccgccacaacccggaaaaatgcatccagctctcgtgggccaaggatgtcaccggcgaattcaacgtcgagctgcgggtggagctggaacaccagcgcggcctgatcgccctgctggccagcagcgtcaacgccgccgacggtaatatcgagaaaatcagcatggacgaacgcgatggtcgcatcagcgtggtccaactggtggtcagcgtgcacgaccgcgtgcacctggcccgcgtgatcaaaaagttgcgcgccttgaccggtgtgatccgcatcacccgcatgcgtgcataaccgatccattacaaggagtcattcatgaccaagacagttatcaccagcgataaagctccagctgccatcggcacttattcccaggcgatcaaggcgggcaacaccgtctacatgtccggccagatcccgctggacccaaagaccatggaactggttgaaagcttcgaagcccagaccgtacaggtctttgaaaacctcaagtccgtggctgaagctgccggcggttcgttcaaggacatcgtcaagctgaacatcttcctcactgacctcagccacttcgccaaggtcaacgagatcatgggcaagtacttcgaacaaccttacccagcccgcgccgccatcggcgttgccgccttgccaaagggcgcacaggttgagatggacgccattctggtcatcgagtaaaacacccggcgcagccccaacaggctgcgccgacttcgtttcagaaggatttcgtaatgcgcaaagcgcttgtagcctcctcgttgctcgccctgttgctcggcggctgcgccagcaaccccgccgacctggatgtgagcggcacctggatcaaccaggccgccatcgacgcggcagccaagggcggccctttgcgtgaagccctgcaatcctatggccccaaccttgagtgggaggtcaacaccaaggccttgcaggcgcgctactacaacggttttgaagtggcggaaggcaagttgtcgggtgaaaaacccggcgcgtggaacgtggacttctatggcagctctgccaccgaactcaaacgcaaaggcaagcaactgctgcaagtggccaacgacaatgagcccgagcagctgtttgcccgcgccaaagacccggccccagaaggcgcgccactgggcgccaacttcgaacgcgcactttacgcggcctacatgggcggcgactggaagatcagcgacggcaccggcagcggcgccacggtgcagttccaggctgacggcaaggtcgccggcctgccgggggttgatcgttattcactctgcctggcaggcgactgcgcctccatgagcggcggctatgacagcatctggctgcaactgaacggccagggcaacccttggatcttcgcgcgcaagggtgagcaactggagatcttccaggcgatcaataccgcgcaggccgatgaagtgccttcgtttacgccaggcccgcgccaatggctgcttgaaaagtaataaaagcctcacacaaatccaaatgtgggagctggcttgcctgctcccacattttttgccgcgcttcagcctttcagaatcgccgcatagccttcccggtaagtcgggtatgtcggcatccagccaagcgccttgatacgcgcattactgcactgtttgctgccagcacggcgcacacttgcatcttcagcccactcggtcacacccaggtactcgcgcaaccaggccaccacctcggccagtggtgccggcgcatcgtcaacgccgatatagaacttgtccagcgaaccgcctttttccacatgccgcagcaaaaaggcgagcaggcccgcggcgtcatcggcgtggatacggttgccatacaacggcgggtcaaccgctacgcgatagccttggcgaacctgagtgagcagccattcacgacccgggccgtaaatcccggtcagtcgcacgatggtcgctggaataccgctgttgagcgccacctgttcagcctccagcatcacctgcccggaatagcccttcgcttgcgtctcggacgtttcgtcgacccactcgccgttttgctgcccatacacactgctgctggagacaaacagcaaatgcttgggcgtctggccgtagtcttccagccactccagcacatgcagcaacccttgcacgtaggcggcgcgatagccggcttcgtcgtggtcagtggcagcggcgcagtacaccaggtaatccaccccgccgatgggccaggtgtcagggcagtcctttttgaacaggtcgccggcgatgccgatcaccccgtcgggcaggcgcgaaatatcgcggcgcaggccgtgaacctcccattccgaggccagcaattggctagccagccgactacccacatcaccgcaaccggcaatcacaacagaaggcacagacatcacaaaactccattctcaaaggcgcagattagccgcgcgagtggatcaacggccagtaaaaagcgaaataaagtaacagtgccactttagttaacaagaattacttgcaataataaccgcccatttgtcctcgacccgaaatggtctggaaggacgatcacccattttttctctcaggtccggccagcatgacacgtcatacaaaccccgcttcgccaaccaagcttcacagtccctcccgcgcctggcgtgcgattgctgcgatgctgttcagcgtgctgctggcaccgaccgccgcattcgctgacgccaccgctcccgccgctccagcagccgccgagcaaaatgccgcgaccccggcagcgcctgccgtcgcgccagtggccaccgacccggcccaggccgccggcgctgccgcacctgccgacgaaaccggcgtggtgctggaagaagacaacaccctgggcatggcccacgacctgtcgccatggggcatgtaccagaatgccgacgtggtagtgaaggctgtgatgatcggcctggccatcgcctcgatcatcacctggaccatctggattgccaaaggcttcgagctgttgggcgccaagcgtcgtctgcgtgctgaaatcgtccacctgaaaaaagccaccaccctcaaggaagcgagcgaaaccgcgaccaagaagggcaccctggccaacctgctggtgcacgacgcgctggaagaaatgcgcctgtcggccaacactcgcgaaaaagaaggcatcaaggaacgcgtcagcttccgcctggagcgcctggttgccgcctgtggccgcaacatgagcagcggcaccggcgtactcgccaccatcggttccaccgcgcccttcgtcggcctgttcggtaccgtgtggggcatcatgaacagcttcatcggcatcgccaaaacccagaccaccaacctcgccgtcgttgcccccggcatcgccgaagccctgctggcgaccgccctgggcctggttgccgcgattcctgcggtggtcatctacaacgtcttcgcccgttcgattgccggctacaaggcccaggtgtcggatgcatcggctgaagtcctgttgctggtcagccgtgacctcgatcacctgcctaccgagcgcagctcgcaaccgcacatggtgaaagtggggtaatcggccatgggcctgcatttgaatcaaggcgacgacgaactcgtcgagaaccacgaaatcaacgtcacgccgtttatcgacgtgatgctggtgctgctgatcatcttcatggtggcggctccgctggcgaccgtggacatcaaggtggacctgcctgcgtccagcgccaagccggcgccgcggccagagaaaccgatcttcctcagcgtcaaggcggaccaacgcctgttcctgggcgaagaagaagtcaaggctgaaaccctggggccggtgctggatgccaagacccaaggcaagaaagacacgacgatcttcttccaggccgacaaaggcgtggactatggcgacctgatgagcgtgatggatgccctgcgggctgccggctacctcaaggtaggcctggtcggacttgagacggcagccaagaaatgatcacgacgcgccacaaactgacgcgttatggcaccagcctcgccgtcgtgctgggcgtgcatgccgtcgcgatcatcatcgcgctccaatggtccgcgccgcaggcgatccagctgccacccgccgccatggtcatcgacctggcgccgctgccagcaccgccgccgcctccagcgccgcccaaggtcgttgcgccgccgccaccaccggtcgaagagctgcccctgccgaagctggccgaggcgcccaagccaacgatccaggtgcccaagccggtcaagcccaagcctaagccacaaccgccaaagccggtggagaagaagcccgagccgcccaaggagaaaccttccgaggagccaccgagcgaaacgccgccgagcaacgcacctgcgcagaagtccgcacagcctacgccgggcccatcggcacagcagctggccgcccaggcttcctggcaaagcacattgctggcgcatctgcagaagtacaagaagtacccgcctggcgcccaacgcagtggcaaggaaggtatgaaccgcttgcgcttcgtggtcgatggtgaaggcaatgtgctgtcttacgaactggaaggccgctccggcaacgccgacctggaccgtgcaacccttgagatgatccgcaaggctcagccgctacccaagccgcctgcggacctgttgaaaaacggcagcgtcgaactggtcgcgccgttcgtttacaacatcgacaagcgtcgccgctgacagagtactgtgggagggacttgctccctcccgcatgtgctttattacctcagcaaaattccgacattccccactcaatccccagcaaagttctgataacgtgcgtctatcgattgcagccggtatgcttggcccgcaacctcatggacgcccgctatgactcttacagaattacgctacatcgtgaccctcgcccaagaacagcacttcggccatgcagccgaacgttgccacgtcagccagccgacgctgtcggtgggtgtgaaaaagcttgaagacgaactcggtgtgctgattttcgagcgcagcaagagcgccgtgcgtctcaccccggtgggcgaaggcatcgttgcccaggcccagaaggtcctggaacaggcgcaaagcattcgcgaactggcccaggccggcaagaaccagctgaccgcaccgctcaaagtcggcgccatctacacggtcggcccgtacctgttcccgcaccttattccgcaactgcaccgcgtcgcgccgcagatgccgctgtatatcgaagaaaacttcacccacgtgctgcgcgacaaactgcgcaacggcgagctggacgcgatcatcatcgccctgcccttcaacgaggcggacgtgctgaccctgccgctctacgacgagccgttctacgtgctgatgccggcctcccacccgtggaccaagaaggacaccatcgacgccggcctgctcaatgacaagagcctgctgctgctcggtgaaggtcactgcttccgcgaccaggtgctggaagcctgcccgaccctgaccaagggcaacgacggcgccaagcacaccacggtggaatccagctccctggaaaccattcgccatatggtcgcgtccggcctgggcatctcgatcctgccgctgtctgcggtagacagccatcactacgcccagggcgtgatcgaagtgcgcccactcacgccgcccgtgccgttccgtaccgtggcgattgcctggcgcgccagcttcccgcgccccaaagcgattgagatcctcgcggactcgatccgcctgtgttcggtggccaagccgcccgttgcgagctaagccacggtatgactgagctgtcgcaggtgtcggtgacggcactcaagggtgtcggtgaggccatggccgagaagctggccaaggtcggcctggagaaccttcaggacgtgcttttccacctgcccctgcgctaccaggaccgcacccgcgtggtgcccatcggtcatttgcgccctgggcaggacgcggtgatcgaaggcaccgtaagcggcgccgacgtggtgatgggcaagcgccgcagcctggtggtgcgtctgcaggatggtaccggtggcttgagcctgcgcttctaccacttcagcaacgcacagaaagaaggcctcaagcgtggcacccgcgtgcgctgttacggcgaggcacgcccaggcgcctctggcctggaaatctaccacccggaataccgcgccattaccggcgatgagccgccaccggtggacaccacgctcacgccgatctacccgctgaccgagggcctgacccagcaacgtctgcgccagttgtgcatgcagaccctgaccatgctcggcccgcaaagcctgcccgattggctgcccctggagctggcccgcgactatcaattggcgcccctggccgatgcgattcggtatttgcatcacccgcccgccgatgccgatgtggacgaactcgccctcggccatcattgggcccagcatcgcctggcctttgaagaactgctcacgcaccagctgtcccagcaacgcctgcgcgaaagcatgcgttccctgcgcgccccggcgatgcccaaggccacgcggctgcctgcgcaatacctggccaacctcggctttgcacccaccggcgcgcaacagcgcgtgggcaatgaaatcgcctacgacctcagccagcaagagccgatgctgcggctcatccagggtgacgtaggcgctggcaagaccgtggtggccgccctcgccgccctgcaagccctggaagctggctatcaggtggcgctgatggcacccacggaaatcctcgccgaacaacacttcatcaccttcaagcgctggctcgaacccctgggcctggaggtggcgtggctggctggcaagctcaaaggcaagaaccgcgtggccgccctggaacagatcgccgccggcgcaccgatggtggtgggcacccatgcactgttccaggacgaagtgcagttcaagaacctcgcgctggtgatcatcgacgaacagcaccgctttggcgtgcaacagcgcctggccctgcgccagaaaggcgtgggcgggcgcatgaacccgcaccagttgatcatgaccgccacgccgatcccacgcaccctggccatgagcgcctacgccgacctcgacacctcgatcctcgacgaactgccgccagggcgaacgccggtcaacaccgtgctggtcaccgacacgcggcgggtcgaagtgatcgagcgcgtgcgcggtgcctgcgccgaaggccgccaggcgtactgggtgtgcacactgatcgaagagtccgaagaactgacctgccaggccgccgaaactacctatgaagacctcaccagcgccttgggtgagctcaaggtcgggttgatccatggccgtatgaagccggcggaaaaagccgcggtgatggccgagttcaaggccggcaacctgcaattactggtggccaccaccgtgattgaagtgggcgtggacgttcccaacgccagcctgatgatcatcgaaaaccccgagcgcctgggcctggcgcaactgcaccagctgcgcgggcgggtgggccggggcagcgccgccagccactgcgtgttgctctatcacccgccactgtcgcagatcggtcgccagcgcctgggcatcatgcgcgaaaccaacgacggttttgtcatcgccgaaaaagacctcgaactgcgcggccccggtgaaatgctcggcacgcgccagaccggcctgcttcaattcaaggtcgccgacctgatgcgcgatgccgacctgctgcccgccgtgcgcgatgctgcgcaagccttgctcgaacgttggcccgatcacgtcagccccttgctcaaccgctggctgcgccacggccagcaatacggtcaagtgtgacgcctgacgcacttatccgaccaacacccgtatcaagctggttatactccaatgactgtaagaaattggatcaggccatgtcagaagttgccctcgccacagccccactgaccgccccgccggtcattcgggcgctgctcgcaaagctcgccatcccctacacggaagtcctcgaacagcctggcctgaaccctgcccgaaaggtccaggcggtattgcttgaggatgcggttggcgcgctcatggtgctgttcccccaaagccagttgctggacctcaaccgcctcgccgaactcaccggtcgccgcctcacggccgtagcccccgagcgggtcgagcgcatgctgggcaagcatgacctgagcctgctgccaggcttgccgccactgaccagttcgccatgcctgtacgaaggccgtatgctcaatgagccgagcctgctggtgcattcgggcgaagccgggctgttgctggaaatccccaccgacgccttcaagagcctgctcaccaaggccagcgccgcgcagttcggtgaaccgttgagcaacatccgcccgaacctcgaccgccccaatgatgaccgcgaggaaatcacccaggcgatgcaagccttcaccgcgcgccgtatccagcaacgcctggaagcgaccatcgagattccgccgctggccgacaccgcacagaagatcatcaagctgcgtgtcgaccccaacgccaccatcgacgacattactggcgtggtggaaaccgacccggcccttgccgcccaggtcgtcagctgggccgcgtcgccctactacgcctcgccgggcaagatccgctcagtcgaagacgccatcgtgcgcgtattgggctttgatctggtaatcaacctggccctgggcctggccctgggcaaaaccctgagcctgcccaaggaccgcccgcacctgtccacgccgtactggcaccagtcgatctacaccgccgctgtgattgagggcctgacccgcgccatgccccgcgcccagcgcccggaggccggcctgacctacctggcaggtttgctgcacaacttcggctacctgctgctggcccacgtgtttccgccgcacttctcgctgatctgccggcacctggaggtcaacccgcacctgtgccacagctacgtcgagcaacacttgctgggcatcagccgcgaacagatcggcgcctggttgatgcgttactgggacatgccggacgaactgtgcaccgccctgcgcttccagcacgaccccacgtatgacgggcaatacgccgaatacccgaacctggtgtgcctggcggtgcgcctgttgcgcagccgggggattggctccgggccggatgaatccattccggacgcactgcttgagcgcctgggtttgagccgcgagaaggcggaggatgtggtgggtaaagtgttggatgccgaggtgctgttgcgcgaattggcttcgcagttcagtcagggatagacctgctgcctgttacaccgctatcgcaggcaagccagctcccacagttgaccgtatttcaaagttggaacgcggtcactgtgggagctggcttgcctgcgatgaatccaacgcggtgcatctgaacgctctacgtctttgacgctcgttcccacgcggggcgaaccagttgggaacagaacgcagatcagtcgtggttcttatcaatcaatgtaaacaccaacgcttttacctgaaaagtggaggtgtacttgcaaaccagcttggtattcggatgtgtgcttggatcaagatgataggcatcccaccctccagtcatacccccgggctgtggcatttttacaggaacacctgattctacagggacgccgaaatgcgaccgaatgtcggatttcgtcatcgtagaagcgagaggtttgggcagctcgcccttatattccaatgtcgacggagtgcttttaatcagagtgatgaacagcgcttccaatcgcttggtttctgcccaaaaactcagggaaagtccccatgcaggttctaagtgcaggcgatcccgcccgtcataaagttcttgtaatggctggttcggtatcagcccttcggtaatcaaatcttcgtagcgtttgcccagatttctgatccagccattaatagtttgcgcactcatcaataccacccctgttctttactgagcctatgcagttgctcccgagccacttcgacgtctgcttcggtgaagccttcctccagaagtccgcgtttaatcgcattgaagttgctgtccaccgcggccctcaggtcggaggcatcctgcatctgctttgctttggtactacgcccgccgtaggtctcactatatttttggtggactcgggcaggaatagcgatgcttggggctcgccgaaggtaatcccttatttcccgtggatccatttctccgtcaagttttagcagaacagcttcaagcactttacgagccgaaagatgatcgatgtcatagccgtctttgatgctgcgactgctcaagtcgtcatatggcccaacttccagtgggtgaaccattggcttggcaaacaccaaatacaacggcggcatacccgagtcagcaggaaacgaaatgatcgtatcctgccaggtaacttcgttagcttcccggccagggtagtggctgattgccgagtcttgccccactgcaatcggatgaacgaacaaattatccagacgttcctgtgcacccggatacggactcggcgcgttgaccaccggcccatggttcggcgtccatgtgatgctgatgccatccagcaccgccaccatcgcgcttttgtccacattccaccgggcttgtgcaaccggcacacggtcagcgccactgccaggttgggtatgtaggccataaacacgcagttcaccggactcatcctggcgaaactggaaacgcactcgcgtgctggccaaacgcatcccctccaactgctccggggtgtaaagcgttgagtcaccgatatcccgtggccagaatgccagcagcacgaggttgagggcggaactggcgccggccaagcctcgtacagcccaggcaccgaggtcgctgccgagtgtgccggctaccctgccgacggcgcccgnnnnnnnnnnnnnnnnnnnnnnnnnnnnnnnnnnnnnnnnatggtagtgtggggtttccccatgtgagagtaggtcatcgtcaagattaaattccgaaaccccaattgcgaaagcagttggggttttgtttatgtagaagctcatgaatttcaccggcacgttgccaacccaacggtctggtacacagaatttcttgacgaccatagagcattggaaccacctgatcccatcccgaactcagcagtgaaacgatgcatcgccgatggtagtgtggggtttccccatgtgagagtaggtcatcgtcaagattgaattccgaaacccctgtctgctaacgcagacaggggttttgtcgtttagggcggcccgtcacagcccatctacgcgacacttaccgcctgtcggtttcctacgctaaaagaagatgcttctcacaaattcctaagatttgtcgaagtttggccgaaagcctgacgagccatgcgtgcaccgaaatagagcgaccgcagagtccgcctatcccgttacatggaatgttccactcggcacgctcacccccctttggcaaaagaagtcgatgaaatgaatctcaagttcagtcataaaattctgttggccgcgtcaggcgtcgtggttttagcctttgcgctattcacgctctacaacgactatctgcagcgcagcaccatcaggcaaaacctcacttcgtccatccagcaatccggcgagctcactgccagcagtgtgcagaactggctcagtggtcgcatcctggttctcgagaacctggcgcaaaacgttgcccaccagggcagcgccgccgatcttcctggtttggtcgatcaaccagcgcttaccagcaacttccagttcacctatgtgggacaagccaacggggtattcacccagcgccctgacgcgaagatgcctgacgactacgaccctcgtcagcgcccttggtacaagcaagcagtactcgcggacaaaaccatgcttactccgccttatatggcggctgtgggcggtcagatcgtgacaattgccatgccggtgaaaaagaacggcgagttgttgggtgttgtcggtggtgacctgagcctgcagacactggtgaagatcatcaactcggtagacttcggtggtatcggccatgcgtttctggtcagcggcgatggccaggtcatcgtcagtccggaccaggaccaggtgatgaagaacctcaaggacatctaccctggcaccaacgtgcgcattgagaagctcaatcaggacgtcgtactcaaaggacaggatcgcatcctctctttcacgcctatcagcggcttgcctggcgctgactggtacataggcctgtcgatcgacaaagaaaaagcctatgccccactaggcaaattccgcacttcggccttgattgcgatgttgatcgccgttgtggccattgcggtgctcctgagcctgttgattcaagtactgttgcgcccgctgaccaccatgggcgtggccatgcaggacattgcccaaggcgaaggtgatttgacccgacgtctggacgtgaccagcaaagacgagttcggtgaggtcggcagcgcattcaaccagttcgtcgagcgaatccacgcatcgatttccgaagtgtcttcggcaacacgccaggtgcacgatttgtcccagcgtgtgatggcttcatcgaatgcgtcgatcatcggctctgacgaacagagcgcacgtaccaacagcgtggctgcagccatcaacgaactgggtgctgccacccaggaaatcgcgcgtaacgccgctgatgcgtcccagcacgccagtggtgccagcgaacaagctgacgatggtcgtaaagtggtggaacaaaccatccaggcgatgtctgagttgtcgcaaaaaatcagcctgtcttgcactcagatcgaaaccctcaatgccagtaccgataacatcgggcacatcctggatgtgatcaaaggcatttcccaacaaaccaacctgctagccctcaacgcggcgatcgaagcggcccgtgctggtgaagccgggcgtggttttgccgtggtggcggatgaagtgcgtaatttggcgcaccgtacccaggagtcggcagaagaaatccacaagatgatcacctcgctgcaagtgggctctcgtgaagccgtgaccaccatgaacgccagccaggcttccagcgaagaaagtgttgaagtcgccaaccaggcaggtgagcgcttggtcagcgtgacgcaacgtatcgttgagattgatggcatgaaccaatccgttgcggccgcgactgaagagcagaccgcagtggttgaaaccctcaacgtcgatatcaaccagatcaacctcttgaaccagcaaggtgtggccaacctcaacgaaacgctcaaggactgcgatgcgctgtcccagcaggccagccgattgaagcaattggtcgatagcttcaagatctgatcctgactgcatcggagcgaggccactcgctccgactgcttggccctgcgtccacggtgctattcagaggaagctaatagcgctcagatagtcgcagcctttgcgtaacagcgcctggctcttgggtggatagcacatccccattttttccaagccccaccgggcattgtcgtaacggatcatcgacgtgtcaccgatgtcttcgcccagcccgtccagataaaagcccagcaccccgaacagggcgttatcacggctcactttgcgcaacgctcgttgccactcttcaacgctgactcggtcaaaaacgtgcccagcctcgctgaaggcatcgaggtactgatcccaattcaagggctgcggattgtgcaagttgaacacgtttcgctcggtgtcaaaatgagcgctatggaaagcgatgaaacgcgccaggaagtccaccggcatcagatcgaaattggcctccagtcgcgggacgagccccaattgcagagaccccttgagcatcaacagcaagcggtttttctgtggctgacaaacaccgttctggctattgaagctgatattccccggacgatgaatattaacccaggccccttgctcgactgctcgtcctaatagccgctcggcgacccacttggaaaggttgtagccatttttcacgtagagcggcagtgtgcgccgggcaggcgtttcaagcacgtacccatcggcgtccacgctgctgcaggctgagagcgtcgagatgaaattgaggaccttcttgcaatgggtctcgcaaagacgcaggcactccagcaccggttcgacgttgtccttggcgagtgaggcgtaatccatcacatgattgacctgcgcggcgttatgcaccaccacgccgtaatggcgggccaggtgctcgtacacgtcatcggccaagcccaggcggggtttacgaatatcagcggcgtatacctgcactcggctcaggtccagatcttccaagcggtattcacgcaacgcctgggcgaaccttgccgccgccttatggccgggtaactcacgcaccaggcacgccacgtcctgcgcgccgccagccagcagtgcctggacgatatgcaccccgacaaagctgttcgccccggtgacgatggctttgcgcgtgtctcccgcaagggccgcgggcagcgtctcgacctccagtgctcgcgtcgcgtcttgctccatctggttggaccgggtatccggcagcgtgccgccatccatgagtgcggccaatgtgcggatggtcggcgtctcaaaaaaggggctcaggcagaagctacgaccaaactgctcgcgcaggcgtagcaacagggtcgacaacaggatggagtggccaccgaggttgaaaaaactctcatcgatcgagaggtcgccagcgggtaatcccaacagttcaccccacaggtcagccagttgtgcctgcaaagggtcttgtacgcggcagcggctcaccccgacgggtgtagttattggcatggccagtaaggccttgcgatcaatcttgccgttattcgaacggggcatgcctgccagctcgctccaagcgcttggctgcatgtgcacgggcaaccattgccgagcgtattccttcaggcttgccagcgtagcgccaggttctggctgggtgacaaacccgatgactctgtgtgccgcatcgatcaccactgccacttggcgaaacaagcgactatcgcgcaagcactgttcaatatcccgaggctgaactcgaaacccgcggatcttgacttgctcatcccgacggccgcccagctcgatgcctacttgcgtccatttcgccaagtcgccgctgcgataagcctgcagcacttgcccattgggcagtgtcagtgccacgaacggattgtcggccagggacggtgtattcgaataacccaggcttactccgggaccgacaatgtacaagtcgcccattacctgttcatccacgggctgcaggttctcgtcgagaatcagcacctggctgttggcgatgggaagtccgacattgcgatggctgtcgccccgttggaatactcgatgggtcgccagcacagtggcctcggtcggcccatagaggttatgcaactggcattgaccggccagttgttcgatcacgcagggctcgcagaaatcacctccggtcagcagatgggtcatgcccaatggctgatccagcggcaggatactgagcagcgccggtggcacgaacccatgcgtgacgcgttgctggcgaatcagctctagcagttgctgagggtcgtgacgttggtctggggtggggacgatcaactcggcgccggcgaccaaggtcgggaaaatatcgatcagtgacgaatcgaagcccagcggcgaaaactgcaggacgcggctgtgttgatccaacgccacgcaactgacgagccaggccgtgaaatgcgccaggttgtattggctcagcagtacccccttgggctggcccgtcgtacccgaggtgaacagtgccacgcacggctcgtcggcacggggatgacggcgcatcagcggttgcgtcatgtcggcgctgtgcgcggcaacctggctcacatcaagtgaaacgaaacgctctcgcaatgggtgctggccattctccagcagcacacaggccttgaggctggtcagcatgcagtgctggcgttgctccgggtggtcaggcaccagcggcaaatacacggcgccacagccaagcaccgcgagaatgctggcgtacaactcggcggatttctccaggcatacgccgaccacttgtggagcctcggcatcctccagcaagggaagcaggcgttgttgaatagccatggcttgttgctggagctgccgataagtcagcgcatgaccggcggtgttcagcactgttcgatgtgcgaaggtattgaggctggcctgcagccgttcgatcatgggcgttcgggccgcgtgcagtaaggcagagtccgccgtgtggttgaaccggtgcatgaaagccaaggcatccagctcttgcagactctgttcaggccaggcgttagcagtggccgttgccgagaaataagcgggatctcttgagaaaccgcagaccaacaaagcagcgcattccaccaatgcatccgttgcctgctggcgcaaccgctgcccattgccgctgggctcctgggcaacgtattgcacagctagcaggcgccgctcgcggtcatagcagcgcaactgcagtaagggcagcccgtgttcgcagagcgggccgatacccacgcgcaagcttaaccaaggcgcactggtgggcgagggcggcagcggctgactcccgtcgtcaatcatcaggtcgatagaccccgctcctgccacatgcccatattgctccagctcctgcttgagcgcctccagagctttactggtgccacgccactcgatctgcaagcgcctcatgccaacttcctcgctacgggcaggtagtcgctcagggctcgtgccacgctaggggtttgcaggacaccgctgtggtgcagaaagcccatgatattggtcaccagcggatgttgatgggtgatgggaaagtccagcgcctggatttcatcgcgcaatgccaggcgagcgtcggcactgataaccaagtgttcgatcagttgcagatcgaagtctttttgtaggtcgttggtcaggtagtgcgtcaggaacacgggcagggcttgggcaatgtggtcgcgatcttgcgggcttgccgactgccagtagagacgcaccaactgtgtccagaaccgcgcatgccgcccttcatcaaacagatgatcggccatcaggccgcggacagaagatttgacgctgccgtctttggaaaatgctgcgacgtcatgggtgacggtgttctcagcgatggcgacgccgatcaactcaacggcatcgtgcaaacataccggtacctgcgcctgggctgccggcagcgcgcggcccaattcaatttgcccgggtagatcaagcggttggattccggtcatctccacggcttgctgcagaaaatccagcgcgaccagcgcgtggtaatcctcgtcgacaacgactgtcatcgcgtcgtagcggcaggcgagcgggaagggcagggagaagcgatttttagcgatgctgcgcgcggttttgtcgacgatctcggtttcgaaaatcaccacgtcattgatgaatttatagaagctttgcatcagtacgaagtcgcgccattgtgggcagtgcttgagaaaggttgcactcagcaccagaggctggcggcacagggggaagatgagtttgtcgtcgtcttccaacatccgccgggggcgtgtgcggatggttgcgcgacgctcccagtcatcggcaaaggattggtagtgggcggcgttcacgggcgtacctcttgcatcgaggccagtacgtcgtcccagagggttatacgactctccacggcgcccagggcggcgttatcggcctgtctctgacggctggggtctgcttcgaacagacgctgtagcaactgatgcgccgcaggcccgtgatcatcgctgtccatttcgatatggcggctgaggtagtgacataacgtaggggcctgccgacctatgaaagcatggctatgcaaaagcctctggaacatagacggaattacactctcgcggccatgcaggaacgccgccgccacacagtgggtcggggcgctcaaggcgatttgtaaggtgctgtcgacgaagcgggccacgccctgaggcgcaccgatcatttgcaacgctgcgcttacctccactccctggctttgcaactcgataaagcgggtgattgcgacagtgctggcgcccacttccgtcatggcgtccaggtacagctcgaagtggctgcaatagccccgtgtcgggtgctcgtccgactcttccgccaatacgatttcattgatcaggcgggcagcgtgcgggtcagcgcaggggagccagggcagttgcgtgccggtcaggtcctgttgcagacgtttggtcaggctcatgaagtcccacacagcaaatacatggtattgcataaagtgttgtaacttgccaagagtggttatttctataaataacgggtggccgaacagtttttgttttttttgctcaagtaaatattgatgcatgttgacgcctatagttgttgcgagtgctgtaaaagcagtgttggaatattatagttgtggatgtaagagtaacttggtcgcgaccacgcgcacgacgctgccttttaaataggcggtcgcagcggtttgtgaaagcggagcttgctggacgaagataataagctgattgaatgtttgaaccggtatacaaatgtattaaaggactttgcggatgtttatatgtgcggtaagttgccaggttgtaggtgggatttttccgtgcgctaagtcggcgttaattgtcctttagttgatttttttaatatgtctgacggggcaacaatccggatagggaagttgctccgtcacgtaagtattaagggctcaagcgaaaaaaaccgactacccggcttttttgtcggcgctctcaaggcccctgaggtaggtcgcgattacctccatgcctcgcatcaagtggttacgcagcgtcaggatgctctcctcgaccttcttctgcgctaccaggctcagcagttcgcggtgatcctcctgggaagtctcgcccagccccatcgcttcaaggttgaagcgcagaaagcgctcctcctcattcaatccgtgctcgaccagagtgagtagccgctggttgggcgccttgccgtacaacaccatgtgaaacaggcgattgagccgaccaatctcggtgtagtctttttcgctttccagtgcattgatacaggcctcggcttgagcaaggtccgcgtcggtgagcaacggaatcgacaggcgtagggcctcggactccagcagcatgcgcaaggcataggtctcagccgaattgtcctcgatcaggggggcgacgacggcacccttgtgagtcaccacatgcagtaaggattgcgcctccagctggcgcaaggcttcgcgcacgggcatgcggctgacgccgaacaggctggccagttcttgctggcgcatggcggtgccacagggcaatcgcccatcgaggatggcattacgcaaggtttcttcaataacggagcgcgcaagatgggcgggaataggcccgctgattttgatgctgcttaatgggttcggcttctgcgtcacggttgcgctatcctccctttttgaataatagtttggctaattggatccaaagaacactaaagatgggccaggcgcttgtcaaacagccaaagtttccgtttgtaagggcttacacagcatactttgtgtctctcacaaggggcggttataaaaacggggctcccgcgaatgattgcactgtgccattgttttttgtagggccaggcttcaccattcgttgaaattccgtctctttcatggactgaacactttggcggtaagttttattccctatcgactgctttgctggcttttatcagcaattttactggctggcctgatgctcggcgggctacgtgccgattgggatttctcgcagatcagccgcaaggccaccgccgtctacgggccgttgggccaaggccagcagcgtatcgacgcctggcagcggctgttggcgagcgaaaaacaggtcagcgagcaggagcagctcaaggtcgtcaatttgttcttcaacaagcaaatgacctacgtggaagacatcgatctctggcacgttgtcgattattgggagacacccgtcgaagcactctggaaaggcgccggtgactgcgaagactacgccatcgcaaagtatttcagtttgcgtcatctgggggtatccagcgacaaactgcgcatcacgtacgtcaaggccctgcggcagaatcgagcgcacatggtcctgacctattactcgacccccgacgccgtaccactggtgctcgacagcctgatggatgagatcctgccggccacccgtcgcaccgatctggtcccggtgtactcattcaacgccgaggggctgtacttgcccggtgccaagggcaacaagaaagtcggtgataccaaacgcctgtcgcgctggcaggatgtgttgagaaaaatgcgtgcggaaggctttccagccgagcctgccaactaggagtaactgatcggatgtctctgttcaaacagctattgatcgcaatctgtctgttcctggtggtcgccttcagcggcagcttcatggtcagcctggaaagctcgcgcacccagtacgtcaaccaactgcgctcccacgcccaggatgccgcaacggcgttggcgttgtcgctgactccgaatatcgacgacccggccatggtggagctgctggtcagctcgatcttcgacagcggttactacgccagcatccgcgtcgtggacctggccaccgacaaaaccatcgtcgagcgcagcggtattcccgacaacaacggcgtgcccaactggttcgtcaagctgatcggcctggagccggccggtggtgatgcgttggtcagccgtggctgggaacaggccgcaagggtagaagtggtcagccatccgatgttcgccctggccaagctctggcaaagcgccctgggcagcctgggctggttgctgctgtgcggcgcggtcagtgtggtgctcggtgggctgctgctgcgccggcaactgaagccgttggactatatggtcaagcaatcccacgccattgcccgccgtgagttcctcagcctgccggacctgccccgcacgccagagctgcggcgcgtggtacaggccatgaaccagatggtggaaaagctcaaggcgctcttccaggagcaggctgagcgtagcgaaaaactgcgcaccgaatcctaccaggacaacctcaccggcctcgccaaccgccgttatttcgagatgcagctcaacgcccgcgtcagtaacccggaagagaccaactctggttaccttctgttgctgcgggtcaaggacctggctggcctcaaccagcgcctgggcggccagcgtaccgaccagttgctgcaagcggttggcgaacaactgctgcgccagtgcgagccgtacccggaaacccataacctcgttacccgtattcgtggcggtgagttcgccgtgctggcgccagggttgatgcgtgaagaagcggtgcaactggcgcaaaacctggaaagcaccttgctcagcctgcaagcgaccggtgccagcgacgttacaccggtcgcctatatcggcctggcaccgttcagccatggcgacgcgccccaagccctgttgaccctggccgaccaggccctggcccaggcccaagcgcagggagacaccagttgggtgtgcctggaccgcagcgccgccgccagcgtgggagacgatcaccatgcctggcataccttgttggaccaggccctgacccagcagcgcttccagctgtatttccagccggtggtggccagccaggacccacagttggtcttgcactacaaagtgctgtcgcgcttgcaagacgaagacggccacaccataccggccgggcgcttcctgccgtggcttgagcgcttcggttggtcggcccgcctggaccgcctgatgctggagcaggtgctcaagcagatgagcagccacaccgagaacctggcgctgaacctctcggccgcgaccctgcaggacccccaggccctgaaccgcatttatgacctgctacgccagcacagcaacctgggcccgcgcctcaccctggagatcggtgaagagcaattgcctgagcagcacgtgctggaacagatgacccagcgcctgcgcgagctaggcttctccctcagcctgcaacgtttcggtgggcggttcagcatgatcggcaacctggcgcgcctgggcctggcttatctgaagatcgacggcagctacattcgcgccatcgaccaggaaagtgacaagcgcctgtttatcgaggccatccagcgagcggcccatagcatcgacctgccgctgattgccgagcgtgtagagaccgagggcgaactgaaggtgatttgtgagatggggattttcggtgtgcagggccaactgtttggcgaacccgcaccctggaaataattacctgtaggagcgagcttgctcgcgaagatcgccaacgataacgcgcaaagcctgacacccgtggtgatcccagttttttcgcgagcaagctcgctcctacagtgcgtaggagcggttggattaaatcaatcctttctcgtcatcatcgatcaactggctcaacccacccaacgcttcccgcgcctggttacggtccatcaacttggcctgggctgccggcggcaggtcggtcacgctgatcacccccttgcgggtcagcacctggatcaagtcatccagcacccggatcatctccaagtcgctctgtttgagctgggccaggctggtttccaccacttcgttggcgtaccaggcctgtatctcatggtgatcggccggcagggtttcagtggattcggtaaaggcagcagcctctacgcgaaccagcgcgccctgtgcatcacgttgcacgtaaaacataacaacccctcgaaaatgcgccacagacgttcaacagcataggtcaacgcggcgtgtatgggcgtgagtatgcgatgccccgtccgccagggccagccacccgcaggccaaaaaaaacggccgcctgaaagggcggccgattaatcgtgtcttaagtgtggtcgatcttgatggtcgggtcggcaccactgatcagcgagttgatgctggtgtgggaccaatcgttgccttccagcttgatcgtcacatcggcattggccaggccaccggcggcgttgagcttgccttcactgctcacttgcagggtcgacacgccgtctaccgtggtgatcttgaggtagttgtcgatggtgctgtcggtttcacctttcaacaaatcgcgcagatcgatgcggtcgccttccgaggccttgaagtccttgatcacatcgttgccgatgtcgccagacttccacacaaaggtgtcggcccccgagccaccgatcaggatgtcgttgccctggccgccaatcaacgtgtcgttacccgtgccacccagcaggatgtcattgcctttgccgccatcgagcgtgtcgttgccgccttggccgaacaagatgtcatcgccagcgccgcccaacagtgtgtcgccggcatctttggcgccggagacgtcgaagtccacatagtgctcggtgacgtactggtgaacgttagaggcagtcactgccgagacagccacgccggtcttctgtgcgacaaaggcctgcagtgcgttgtaaccctcgccattgatcccgctgaagctcaccaggtcgccgaacaggatgtcgttgccatcacccccgatgacggtgtctgcgccaggcaacgtcgcctcggtgtggccgaggatcgcgttggccaggtccttcggatcgatgttggcttgcggcttgccatcgctgtcgtacggagccagctggttcaagctgaccccgctgttgaggccgatggcttctacgccacctgtggacaggcctttgagcagtgcgaacgcgctgttggagttgagggtggtggagtagtcggtctcgtacccgaggccgccttgtaccgatatttcataggtgccatccccttgggcatggattgttcccgggttggactgcccccagccccaccagttgttggtccacagggttaccttgccagcagagtcgatatcaattaagtgactcgagtcgatgttgatccgggtggcggtgcctatggtgtagttgttcatggtgacgacatcatcgagcctgacgttgccgtacaagtacgggttggtctgctcggccgcttggtaaaacgtcggctggccatcggtgatgaagtacgttgtgttgattgcgtctgtgttgccagtcgcctgggcacttttgaagaagttggacgcggccttgaacacatcttcgtagttggtcccgccggtagacaccatggaattcaggactttctgcagcgaatccaacgcacctgggtctttcaggttgactgtcaccgtgcgattgacctggtcactgaagtccgccaggaagatgttcacggtgccagaggtgctggagccgatactgtttttcagcgagttgaacgtggtggtcagcgaggctttcgccgccgctatcgagctcgcgcccatactgcccgacgtatcgatcatgaacgcgatgttgtagttcttgccctgcaccacgttcaggccggcgacgtcggccacgacgatgtcgttgccatcgctgccattgatggtgtcgctgcctgaggtgccggtgaccgggttgtaggtcgccgggtgcaccgtgactggcaactgcgcggtggtagtcgccgaaccaccaatgctttcggtggaggtcgaggtgaccgtcaggttgaactggccgctgtagtaggtcggcggcttgatggtcagggtgttcaggtcccagccggtgacattcacttcgcccacggttttacccgcggtaaaggtgtgccccgatgcgtcggtgagcaccgagcctgccggaatgccgctgatcttcacgctcagggtttcggagccgtcggtgtcggtcagcgcggtggtgaccttggacagtttgaccgtcccgttctcctggccttcgttgagcttgtagcccacgtagtaaccgtcaccgttgctgccatgcaggtcggatacggtgacgccggcgttggtcaggtcggtaaggccggtgtacaacggcacggtgctggtgctcaggttctgcaccgccccgccgttgatcgacaggttaacgtcgaagctgcctgggcccgcctggttggcctggtagatctcaaggctgtagtaaccggtggtggttggcgtgaacgagccgctgaacttgccgctgttggtgccccacaaaccgctggcaacgtctttaccgccaacgttgaccaccacgctgtcatcggcgatgccgctgaaggtgtagctcttgccggcttccatgtagatcaggccggagatttttgagccagagccggcggcgacgttgtcgacagactcgacgttggtcaccaccgaggtgttgttcggcgtgcccgcgttatcgatggcttttttcagcacgtccggtgcagcgccgttgccgttgttgccgaggccggcaatgctgttccagccctgtttgaccaggccggtggaggcaacgttgttgtctgccacgctcagggtcggcgcgtcggctaccggcgtgatatcgactttcaccgtggcgctggtacccaggtccttgccatcggttggttggaacttgaactgcgcgtaatccgcctgcttgttacccacgccagtgccgccataaccgtcggcgccggactcgttggcgttcggcgtaaagcgcagttggccgccatcgatctgagccttggtaaaggtctggccgctggtcacgttggtccaggtgctgccgtccgccgccaggtattgcagcttgccggctaccggcagctcggtgattttcaccccgaggctggcttgtggcgagtccacatcgctcacgccgaagttggcccaggtcagggccagcgcggtgtcttccgtaccggtcacggcaccgccagtggccactggtgcatcgttgactgctaccacgttgacggtggtggtagccacgttggagtagttgccgccatcggtcaccgtcacggtgatggtgcgcggcgtggtgctcgggtcgtggctgttgttggtgaacgtgatgttcttgatctgctgcatgtagtcggccagcgacgccgtcccggtcagggtcaaggtgattttaccggtcacagggtcggtagtcggggtcacggtgatgccgctcacgccgctgaagttcagcgagtcgcctggctggctgttggtcaataccacggtggcgccggtcagttgggtgctgtccgggtcggtgatcttaatgtcagtgtcagcaattgacacaccggtgccgccttcggtgaaggtggtcttgaagtccgcaccgctggcgccgctggagttgttggcatccagatcgatgaccggcggcgcatcattgtcgatgatgttggtggtaacactgccattgccgaccaccaggttttcgaagttgccgccagtggtcttgtcgatggtgatgacgatattttccgtcggctcggtgatcttgtcgtcgagcgtgcggatatcaaacggtacgctgctggagcctgccggaatcttcacggtgtacacgccattgaagtctgaaccgtcggtagcggtgccgctgtacttgagcgtcacggtcacgtcggtttgcggcgggttgctcagggtcagcgtgtagtgcgccgtaccgccttcagtcaccgacgcatcgccggtaatgctgatggtggtgttgctgaccacatcggtcactttggtaaccacggtgctgccgtcgacgatcaagtgttcgtacttgtcgccaccgctgaccacacccgtgattttagtggtgacgtcattggcgccgacatacgcatcgttaggtgcggtggcggtggtgaagctggtggacttgccattgccgatggtaatggtcgagccgttatccagcttgacgaccaggtctgagccaacgttgttcaccgccacaccgttcttgtcgaccagggacgcggtgtacacgatctgcccgccttcgctgaccgagccagtggccttgagtaccacggtcacgtcatcgatggtgtcgttgatggtggtcgtggcgcccgcaggtgtgatggtcacgccctcgaaattgccgccggtggtgccggtgatcttgacggtctgggtgctcttgtcgatgaacacgtcatcggtaggcgccgggacggtcaccgtgcccacggtctcaccttgcttgatagtgatgctcgaaccgttgtcgagctggaccagcatgtcgctaccggccttgttgctcaaggtggcggtgtaggtgatctggccgccttcgttgaccgcggtcggggcagtcagggtaacggtggtcaggtcggtggagcctggtgtgtcggtgacggtggtgttcaccgccgtcgtgcccggcaccaggttctcgaagtgctcgccgccggtcacgcctttgatggcggtggtgacggtttggtcgcctttgtacacatcatccggagcaagaaccgaaacgctaccgctcgattggttcacaccgatggtgatggtcttgccgttatccagggtcacggtcagcggattggtgatgttggtcaccggtgcgccgttcttatccacaaggctggcggtgtagacgatgttgccgccttcgccgacggtggtagtggcggtcaggaccacatcgactttgtcgatggtgtcgttgatcgtggtggttgcgccattgcctgccacttcgagtttttcgaagttgccgccagtggtctcggtgatcttgacggtctgcgtgctcttatcgataaacacgtcatcggtaggcgcagggacagtcacggtgccgacggtttcgccggccttgatggtgatcgacgaaccgttatctaacttcagcgtgacatcagtgcccgctttattggaaagcgttgcggtgtacgtaatctgcccaccttcgttaacggcacttggcgctgtcagcgtaacggtggtggtgttatcggtacccggtgtgtccgtaacggtggtgttaaccggggtagtacctggaaccagattttcaaagtgctcgccgccggtcacacccttgatagcggtggtgacagtttggtcgcccttgtacacatcatccggagcaagaaccgaaacgctaccgctcgattggtttacgccgatggtgatggtcttgccgttatccagggtcacggtcagcggattggtgatgttggtcaccggtgcgccgtttttatccacaactgtcgaattccggccagcgtggtttaacggggcgcctgagatcaagatcacaagcagatcaagagcaagatcaagagctactcgcttcgcatcgtggttaccggtggctgcggcgaactgcacagttgtgtagatacctatgctgcgatagcggtgtgacagtctccccagggttgctgacccaccgctatcgcacgcaagccagctcccacggggatttttgcttggcctatggggccgtgtcagactcggtcgagtacatccagcgcaacaacgaatgccgcccgctgatccccaacttgatcgccgcacgcttgaggtagctctcgatggtgttgaccttcaacgccagttgttcggccaactccggcgcggtgcgcccggccagcaggcctacgcacacttccagttcacggttggacaaggtcagccccgattgcaccaggcgctcctggatacgtcggcgcaaggtatcgatgccctggtgttgcggctctgccgacgggctgtccgagagcgatggctgcagcgcggtgatgtgtttttccaccatgggcagcaacagcgtggagaagtcctggagcatgctgcgttcttgcgcagaaaaactctcggacgggtgggagcggtacaccgacagtacatagcgcacatcgtccttgcggcgcgtgaggtgcagttgtgcggcgagttgctcgctgtccagggccgccaccgaatcggtgtacaccgggctgattttgcgacggccaaggccttcacggctgacgtgcaattgggtgatatgggtggcgtccactgccagttgggtaaggatcaggtcatgcagcatgcgtgggaaatggcggctgccggtgctggcgatgaccttgcctatctgtgggaacaggtgtgagttcatcaattcgtccatgagtttcgtgcaggtattgggccttatagcgacggggattaagaaggtaactaatgtgaataacctgcagtgatagtgcgtcccgccgctgacatgctagtacaggctggctgaaggagggggatccaatctgcgaaaaaaaaacattaagcaggtacagcggcagtcggatccttagtcgaatccttccgatcaccgcccaggcaccgcaaaacgcttgggtttgggcgctatttcagcgcgtacgccgatgtagtggtgggccgcaggttggcaccgttgcacttggccagggcttgttggatatccgccagcaggtcggcgacgtcttccagccccaccgacaaacgtaccaggccctcgctgataccgtgctgcgcccgttgctcgggggtgtaggtggagtgggtcatgctcgccgggtgttgggccagtgattcggcatcccccaggctgaccgcgcgggtgaacagttgcagcgcgttcatgaagcgctggccggtctcgatgccacccttgagttcaaaggcgatcatgccgccgggcagtttcatttgtcggtttgccaattcgtactgtgggaaagaacgcagcccggggtaggtcacccactgcaccgcagggtgtgcctgcaacgcctcggccaccgcctgggcgttgctgcaatgacggtccatgcgcaggcccagggtcttgaggccgcgcatcaacaacgcggcgtcctggggtgacatcaccgcgccggtcaagtccttgagtccttgcaggcgaatgcgctgggccaaggcctggttgctcaccgcgatgcctgcggtgatgtcgccgtggccgctgaggtatttggtggccgagtgcaccaccacatcggcgcccagttccagggggcgttgcaggtagggggtgcagtaagtgttatcgaccaccacggtgacgttcggctgttgatgagccagttcggccacggcggcgatgtcgatcaggcgcaggttggggttggccggggtctcgcagtagaccatgcgggtggccggggagaaggctgcttgcagggcggccaggtcggtcaggtcgacatgccgcaccttgatgccgaattcgcccaggccatggtgcaacagggcgaaggtacaaccataaagcgtctggctgacgatgatctcgtcgcctgggcgcaacagagtccagaacgtcgcggcaatcgcgcccataccggagctgaatgccacggcggcttcgccgttctccagactggccatgcgtgactccagcagggccagggtggggttggaaatgcgcgtatagaagtggccgctggcttcgccggcaaagcaggcggcgccgtattcgacagtggggaaggcgaaggtggccgacaggtagatgggcgggacgagggcgccgtggtggtcaagagggtcatagccgtggtggatggcacgggtagaaaagccgaagctggtgtgtttagtgtgcatgtcgggcgctccttatttcctacaatgctatgctcataaccacagatgaaccttgcaaaaaagcctggaaaaacccgcgtttgtggatcaaacaccgataaaaataatgattagaggcacgttatgcccatcaagctggaccgtacggacaaaacccttttaaacgcgttgcaaggcaacgcccgcctgaccgtggccgagttggcagagcgggtggccctcaccacctcaccgtgctggcgccgggtgcgcaccctggaggagagcggggtgatcagtggctaccaggcgatcctttctcccaaggcgctgggttatggggtgaccgcgtttgtcagcatcatgatggagagccacactcaggaaatcgcccgggcgttcgagcagcggctgttggcgattccggagattgtggcgtgccataacgtttcagggcgctatgactttttgctggaggtggtggccaaggacctggagtcgtttggtgagtttgcgcgggaggttttgcagacgttgccctgcgtcaaggagatctattcgagcttttcctacaagtcggtgcggccgttgcgggtgattccgttgccgggttgacgggaggcttacggcgcgagccgatgcgtatccacccgacgccccgcgatccaactgtgggagttggcttgcctgcgaaggcggcctgacagccgacgcagttataccgagatcaaaatcagagcaagagcaagagctactcgcttcgcatcgtggttacgttgggccgcttttgcttttgtgtgccaccccatgcaacaacagcgcctcaaacacccgctgcacccgtggttcatcactgtgggccacattgaagcgcatcgagtcgcgatgggccgggtcatagccaaacagcgcaccgggcgccagcaccatgctgcgtttcagggcttgctgagccaggagttcgccgttcacgccaggcggcaggcgtgcccagatgaacatcccgccttcatacgccatcggcagttcgcacccgcagcgtttgagccattgttcgacgcgccctccggcctccatcaggcgttgcaccatgcgcttgcgatgcttggcatagctgccttcgctgagcatacggtagacgatttgttcgaacagttcggaggtgacgccgccgctcatcaatttcatgttggtcaggttggcggccagttgcggcgcggcgacgacgtagctgacgcgggtgttggcactcaggatctttgagaaacccgacaggtaggtgacctggtccagcccggcgacggcggccaggcgtgggggtgggttggggtgcaggtcgccgtagaggtcgtcctcgacgatgtggcagtgatagtgctgggtcagttgcagcaggcggaacgcctggctggggctgaaggagtggccggtgggattgtgtaacacgcttgtggtcaggtacaggctggggcggtgttcggccagcagttgttcgagggcggtgaagtcaaagccgtcggggcggcgggcaatggtgatgactttgacgccgtgcagcgccaggttggcgtggaagttgaagtagcacggtgcatcgagcagcaccgtgtcgccggggcgggcgagcaggcgcatgagcatgtccaggccctgcacggtattgggtgtggtgatgatttgttccactggcaccgacaagccttcgccgtgcagtttctgctgcagcgcctggcgcaacggcaacagccccgccggtgtgcccagcccggcgatgcgcagtgacggcgcacgcactacgctgcgcatcgcctggcggatcgcttcgccattgagccaatcctccggcaagtgcccgccgccagggcgcagttcgccactggcagtggccaagggccggcgcaaaacgctgagcaggtcttggggcaacaggtccacccaggtcgccgaggctgggcgggtgctgtccatcgccacgaagtagccgcggccttggcttgaggtgagcaggtggcgaccgcgcagacggtccagtgcctcgttgagggtgaacttgctgacgccgaggatctgggtcagttcacgcacggatggcagtttgctgcccggggcccattcgctattttcgatggcgtggctgaacgcctcgacgatctgttggaccttgggcgtgccctctacaaaagcgatggcggatacaaacatgacgcgtccttgtgtttgccggtgcttttaccggtgaagttaggctggattaggcatcactttacctgccttgtgcaatgccactcccctagactgcgcggcatctcgccaggagatggcgaaatttcctacacctaagcaatggattttgcatttccatgaagacttatatgtgcgcaccctgcggttttatgtacgtagaagaactgggtattccggaggacggaattcccgcaggcaccccttgggaagaggtgcctgaagactgggcatgcccggattgcggcgtgaccaaggccgatttcatggccatcaacctacccgaacctcaagaagcctgacccgccatcaacgaaaggaatcgtcccatggacagcaaactgatcaacgccaccgtcccgttctgcaccggtgtggcccaccagaaatacctgggcgccgaaaagggcctgcaaaccgccatcgaaggtgactgcacccactggtacatcgacggcagcctgttcggcgaaatggtcgatgactggaccgaggcgcgtatcgaaagcctgcaagcgcaaatcgcggccacgggggtcaagccggttttccacggcaacttcaaggcgccgttgggcagtgatgtcgaagccttccgtagcgcggccgtggagtacgtgaagaaggaaatcgacatcgccagccgcctgggcgcgccgttgatcattcacggtggttgcatcgtcgagccgaaaatggtgttgatggccaagaaggttgccctggagcattacctcaagtcggtgcaggaactggcgttgtacgccgaggccaagggcacggatatctacctggaaaacctgtccaactacgtcaactatcggccattccattacatcttcacccatgaagcggaatacgcctttgtgttcgagcgcctgcaagcccacagcaatgtgtacttcttcctcgatgccggccacgccaacatcgagaacggcctgccggcagaagtggtgcgcaagtaccaccacctgatcaagggcatttccttcagcaacaacaacggcgtgcaagaccagcacttcggcatccatgacggcaactgcgattacgccgatgtgctgcaggctattgtcgagactaactggaagggccttgtcgcgtttgaaacccgcaaccagaccgccaaggccgccctggctgacctggcggtgatgtaccgcgactccctgaccaccgaaatcgccgtcgcctgatcggcctggggcgggcgctggctgcgttcgccccgttgctgctgtttctctttattcaaggtgctggccatgacaagtgcgttaaccctgtcttcatttctctacttcctgttgttttgcgccaccatgaccttcagcccgggccccatgaccctgctgttgctcagcctgggcttgaaggacggcctgcgcagttcgatcccggcgcaggtcggcgccagtgtgtcgtacctgatttcgatcctgatctttgccgtgggcttttcggagttgatcaagggcaacctcgccgttacccagaccatccagtttgtcggggtggcctacattctttacctggcctacaagcagtggaccagcagtggcgtatcgatcaacaacgccggcacggttgagggcgcgcgaagcctgttcggcaaagggctgttgaccgggttttccaaccccaagaccatcatcatgttcagcgccgtgttcccgcagtttgccggtgctggtgaacacagctcggcggcggacatcgccattctcggcgcaacctttctgttgctgcaatttgccagcggctgcctgtattgctatttcggccagcgcatcaagcacgtgctggaaaaccccaagcggcgcgtgctgttgcagcggatcacagccgtgttgctgctgggcgtggccttgatgctggcgcgtgggttttcgcactgaagtattagccaataagcggtagtggcgatttgacgttgccctgttagactccaggcaatcacccaggatcgcccccaccatgccagccgtcggaggaaaaggacttccgctcgctttgcgcttgtacaaatcccgcctgttggggctgacgctcggctttgtgtgcgtggcgttcggcatgtatccgttgagcccgcccctgtgggtgtgggcctggatgctgatcaacgcctttgcgtggccgcacctggcttttcaatgctcgttgcgctcggccaataccttgcgcagcgaacgccgcagcctgctgttcgattccttttgcggtgggttctgggttggcgcgatgcacttcaacccgctgcccagcgtcaccaccctgtcgatgatgagcatgaacaacgtcgccatcggcgggccgcgcttcctgtttgcgggttgggcggcgcaggcattggggctgggcaccgcgctgctgctgttcacgcctgggtttatcgccgtgactacccaggcccagttgtatgcctgcctgccgatcctgatgctgtatcccctggccctgggctggatctgctaccgccaggccgtcaccttggcccgccacaagcgtgagctgctggccttgagccgcaccgacagcctgtcgggcctgctcaaccacggcgcctggaaggaccacctggacctcgagtttcaacgttgccgccaaggcccggccggtgccgccatcgcgttgatcgacatcgaccacttcaagaccatcaacgacacctacggccatgtgaccggcgatatcgtcctgcgccaactgagcaaggtgctgcgccagaacctgcgcaccaccgacctggccgggcgttatggcggcgatgagttctgcgtgatcctgccaggcatgcccctcaaccgtgccaccgaggtgatggaggccctgcgcggtcgcttcaacgccttggcctacgcccaggacccgacactgcgggtgagcctgagcatcggcctggcgccttaccagccgagccatgccgactccatcagttggctcaacgatgccgaccaggcgctgtacgaggccaagagcagcgggcgcaaccgagtcagttcggtacagggcagttggttgcggtcagtttagtggggtagggtggcggggcaccctccaacaaaaaacaaggatcggtccatgctcttcaccttcccgcgtaccctgttggccgctaccctggccttgtctttcagcctgccggcctacagcgccgagcctcataaacagatccagcaacaggccgaacaatacaaggccgaagccttgaagctgctggagcgcctggtgaatatcgactcgggctcaggctacgagcccggcctgactcaagtgcgcgatatcgccgtggatgagttgaaacagttgggtttcaccatcgaactggtgccggataaagccgccaacaacagccatgtggttgccaccctcaaaggcaccggcaaggccaagatcctgttgatggcccatatggacaccgtattcaaggaaggctcggctgccgagcgccccttccacatcaaggacggccgagcctacggccccggcgtgatggatgacaagggcggcatagtcgccggcatctatgcgctcaaagtcctcaaaagccagggcttcaaggactacgcgcagatcaccttcctgctcgacgccagcgaagaaaccgggtccgacgccgcttccgaactgatccgcaacactgccaagggccacgatgtaaccctgaacctggaacccggtcgccccgccgacggcctggtggtgtggcgcaaaggcagcgctaccgccgtggtcgaagtcaaaggcaaggccgcccacgccggcgtcgccccggaactgggacgcaacgccgccatggaagccgcgcaccagatcctgcaactgggcaaactcggcgacgaagacaagaaaaccaccatcaacttcaccgtgctcaaggctggcgaccgcaccaacgtcatccctgaccaggccaccgccaaggccgacgtgcgtgcggccttgccggaagaattcgaccggatcgagaaagacctggcccgggtttcagccaacaaattgatcccggaaaccgaagtgaacaccagcctgcagcgcggcctgccaccgatgccgcagaccgccgagtcggataagttggtagcgattgccaaagggatttatggcgaactgggacgcaagttgaccatcgaaggcagcggcggcgcggcggatgccagcttgtccgccggtgtaggcacgccgacgttggatgggtttgggatagtggggggcaatattcacacggcggaggaatatgccgaggtggagagtgttgcgccgcgggtttatttgttgagtcggatgatcatggagttgtccaagcgctgatcagatcgaacgaagcgggtttgaatgtgggaggagtgccagtcaggtaaacgcagatcccctgtgggagcgggcttgcccgcgaaggcggtgtgtcagtcggagcatgtgttactgcactaccgctttcgcaggcaagccagctcccacatttgatctttgttgcctttagcgttgcgttcgcttgactgactggcattggggtcagcccctccgacattgagtactgcattcaatgtggaagtcaccatgtggaagggtcttcaaggctggctttttggaggtcgtctttccagacctcgttggccagtcgataaatgtccgcaaagaagcctcgggggtcggctatttctgtttcgtcccaggccattgttatgtattcgtcataatcgctttcaaattctttggcgaaatcgaagtcagggttgctcaattcattcttaagcattgagattagtacgtgtcgatgcctgtaagaaaggtacatcaaatcttttaggataaaatcttttattattatttctcgctctgtggcattgtttgggtcatatttccatagtgccttacctttggtttcttctaggtcatatattgacagggctgccaagatgtaagagatcctaggtgtgaaaggcgtatctctaaatggtgatttcagcattgtaattctcagtatgggaacgcagtgaatgggcgtgttatattttctttgtcaaatctaacttccacgttattcatgttctctatgtatttagggttgtttttgtcttttttattgggtttgtatccgtgtccggagtttggggactccatttttactacgggattgccgaagttgtcatatcccgtatatgatggattgcttccttgcattttatatatcgctttattgagggcgtgaagatgtattttccagcttttgaattgagagctcgagtttactttctctttctttccggtcgctgggttcgttccatctattgatcgtttttgcattgtcgtctgtggtatctcctttccgtgtttggcgacagtatgcatgtcatatttctcttctaattcgattacgcgccgtttggcattcgcttcacttagctcctctatcctggctcgtctatgatccccggtcggttgaggcactgagggctggccctcctcaacgcgtgcctttgctattggactttcagccccgactgttgacttacacccatcattacttgggcatgaattcaggcccagcgggtctacccaacctgtcggattgggcacataccgatacccattgatcccacccgccaacttcaccgggtccggtgtcaggtagcgaccaatatccggattgtagttggtgctcggcggtcaggcggttttggcggtcgtattcgtaggccaacgcccagttaccgtcgtcgacgctgaggaggttgccctggcggtcgtaggcatagtcgaccacgctgttatcgggcagggtttttcgtacgaggcgcccggcgtggtcgcgctcgtaacgggtcactagctgactgccgtcgtcgccgtgttcggtcttttccagcaggtttccgttgaggtcgtaggcgtaggcggtgcgttggccgtcgaagccggtttcctggcggatcaggccattggggtggtagtcgagttggtaggtttcgccggtttcgttttcgatctcggtgagcagcagtcgggtgttgtcgtagcggtatttgacctgggtgccgtcggcgttgaggcggcggctgatcaggtgcaggccaccttcgtattcgtagcgggtgacgtggccgagttcgtcgcgttcggcgatgattttgccgtaggggttgtagctgaattccctacaactaccgccaggcaatacaagacgaatcaacctgccgacgctgtcccattcataaacggtctgtgcgccgtgttcatcctcacgggcaatctgtcgacccagatcgtcatagcgataacgcttgatcccaccatggggcaattgctcctccagcaactgcccacgctcgttccacaccagccgatgacaactgctgtcgggataccaaaccccaatcagttgcccgtgcttgttgtagctgtagtccgtaacctcaccatcgggatcggtcctacgcgtaaggtcgccctgatcattacgctcatatttccaaaccgcctcgccacgccgtacaactcgtacaaaaccgttgtcatgctcgtaggaagtcggctcatcatcccccggaaacaacgccaccaagcgtccggcgtcgtcatattgataggccgtcaccgcgcccatcgggtcttgctcgacggtcagccgcccctggtcgtcgtaggatttaaagtgcgtggcgccgtccggatcgacgcgctgtaccagccgcgcccgctggtcatggacatacacctcctggctaccatcggcgttatgcacggtgacgcgaccgtcatccccccaggcatagcgcgtgtccatctgcgaaaaacttgcccaatgccggacgcagcgcgccgccttgccagcgtgttcccattcccagaagaaactcgcgccaccggccaactgccgctcgagaatgacgtgctgatcgtcgtaccgataacgctcgctttctccgacagcattggtcgcgcaaaccagtcgtcccgcttcgtcataggcgtaggaaacaacgttctgctcggtttcccagacgtaaggtgcacgccctgtggcgcgatgcacctggtagtccaccgcgacgatgcgatccagctcataacgcaacagcagcgaacggccagcaccgttatccagccgctcaatccgccctgagcgatcacggcaaaggcgcaggcggttgtcatatgcatcgctgatggttgtcagcacaccgtcgcgaaagttgtagaaacgggaggcctgggccagcaccaactcgtcaggcgccgaacccaaatagatcgccgcttccgccaggctattggtgatcgccggccgagaatcggtgggcaagggcagggtagtcgagcggttttcatggtcagtccacaccaccgaatcgcccgacaccaccagccgatgagccagcgcatggctccaacccaaccccagcccacaatcgacctccaccgcgctagtgcgatacagccgtgtccactcaaacggcaaaatcccgtccagcgcgccgtcggtgagggtgagcaattcctcgccggtgaccatcgacaccgggcagccgttggtaacggtcttgtccgctgacgccgccgcatcacccttggggttcgacgccacagccggcacatcatcgacaggctcctgacggaccaacgtcgtgcgctgggccttgccgcgcaccatcggcaccgggttcgaaaccagcgtatcgcccgccttcaacggcacagccggcaccgtcttaatcggcgtcgccgcactgctcagcaacaccggcttggcggcctcgacatgggtttccagccgaggccccgtcacctgctcggccagcaactccaacaacgcccgcgcccgcccggatttgacgtgactgagcgtctgcgcgcccaggcgcagctgtaccccaatgccccgcgtagcccagatcagcaacagattgatcaacacttcgccggtgatttcacccagcagttcgtacatgtcgggcggcggcagcatgcgtatccaggccaccagcgccgacaggtagataaacaacagcggctcatcactgagtaccagcaaccccttggccagcgtgtctttgcccagcttgagcagtgcatccagctcggcctgggacaggtatttcagcaacgtttcgctgttggacttgaggttggcgagcaggtcgtacagctcggtgatgttgtcccacaggttgtaaagcgccttgcccagcccggtcgcaaaggcaatgccctgaatgccgctacgcttgtaggctggcgctttggcaaagtctgcccatcgaggcttgaaatgctcggcccatgccgtgcgcaaatccgcttccagcccggtgatcacagactcataggacgcatacagcgcctggacgtgagccttggaaacagtggggtaaaaggtgatttcgtactgttggtcgcggctacagtcgctgacttcaagaatgccgctggggccaatggtccgatgcagtggcgcgcctaccgggctgccgtcctgtgcaacggcttgcagcctcacgggcgtgttgccgataggcacgaactgcgtgctttcgaacagatgcaccagcgtcagcccgccctgggctttgcattgagcgaccgtgcggctgggcttgtcggaagagatcggcgcgaccagtgcgacgtcttccccaaccttgaacacctgctccacgctaagtgccgaaccacttaaaaagctgtcggcccacgtatcaaaggtattcaggcaggtgcggaaatccgcgaatacgcgctcaaccttcggcgcttcgggatccatcggcaccagcatcaggttggccagcaccgagatcaagagacagccccattcatcagggctctaacgaacaccaccatctgcaatccctcgcactgtttgatcaggcgagggactttgcagaggtttacaggggaggggagtagcgcttatccggccgttacgtgggacatttcagcaaccttgtcgcgcagcaccaagctgcacagcgctggcaagaacaacagcgtcaacaccgtgcccaccaacaccccgccaatcagcacataggccagggacgaccagaacacagacaacgtcaacggaataaacgccaacgccgccgccagtgccgtaaggatcaccggtcgggcacgccgcaccgtggcttcgataatggcctcgcgaatcgccatgccgtggtcctggttctggcgtatctggtcggtgaagatcagcgtgttgcgcatcaggatgccgccgatgccaatcaggcccaggatcgcgttaaagccgaacggctggttgaacaacaacaaggtgggcactgcgccgatcaggcccaaaggcgcggtagcgaacaccatgaacatcacgccaaaggagcgcacctggaacatgatcaccgtgagggtcagcaggatcatgatcgggaacagcgccgccagggcgacgttggctttggcgctttcctcaaccgggccgccgatgtcgattttgtacccgctgggcagtttggcgatcagtggctgcaggtctttgtacacggccatttccacatcgggcggttgtacgccgtcgatgatgtcggcgcgcacttccacggtggtggcgcggtcgcggcgcttgaggatcggctcttccattaccgcctggaaatgcccgacctgggccaatggcaccgaggttccggcgctgttggtcagggtcatgttgttgaggttgcccaggtcttcacgctggctgccctgggcacgggccaccaccgacacggtgcggttgccttcgcgcacttcggtgatcgggttgccgctgagcaaagcgttgagttgggacttgacctcgtccggcgtgaaccccagcaggcgcaagcgatcctgatccagcaccaggcgataaccgctggcacgttcgccccattcgaggaaggtgtctctggtcagcttgttgccggctaccacctgacgcacgtcttcagacaacccacgcagcacattcaggtccggcccggaaacgcggaacaccaccgggaacggcactggcgggccgaagacgagctgtgtgacccgaacccgcgccgaagggaattcgcctgccgcaatgcgctcacgcatccgcagtttcagtgcgtcgcgggcatgggaatccggcgtttgcacgatcaacttggcgaacgccgggtccggcatttcagggttcaacgacaggaaaaaccgtggtgcgccgccgcccacataggtgtcgaccatgctcgtctggggttcctgcaacagcgccttctccacctgagccgctacggcctcggtgcttttgaacgcgctgccgggcggcatatacacttccagaatcagctccgagcggtccgagtcggggaagaactgtttcttcaccaccgccatacccaggccacacagcacaaacgcggccaccaccagcccagttaccagccagcgcccacgcacgcaggcctctaccaggcggcgcagtttctggtagtagcgcccggcataaatcgcatcatgcccgccgggcactggcttgatctgcggtagcatctttacgcccaggtaaggcgtgaacaccaccgcgaccagccacgacgaaatcaatgcgaacccgacaatccagaagatattgccggcgtactcgccagcaccggagcgcgcaaaccccaccggcaaaaagccaatgatggtcaccagcgtaccggtgagcatgggcgcggcggtggagctccaggcataggtcgccgcgtgaatgcggtcaaacccttcttcaagtttcaccaccatcatctcgatggcgatgatggcgtcgtccaccagcaagcccagggagatgatcagcgcgccgagggtgacccggtcgaattcacggcccgtgaccagcatgatcacgaacacgatcgacagagtcagcggcacggcggccgccaccaccagccccacgcgaaagcccagggccaacaggctgatcagcatcaccaccgccagggcgacgaagaatttgagcatgaattcattgaccgccaggctgatgttcttcgcctggtcggacaccttggcgaagttcacgcccaggggcaggtcggcctggatccgcgcttcttcggcttgcagactcttgtccagttccagaccgttccagtgcttctccatgatcacgcccagcatcagcgccgggtcgccctggtggcggatgcggtaactgggcgggtcttcataaccccggctcacggtggctacatcggcgatgcgcaatacgcggccattgacttgcaggggcacgttctcgatcaaggccaggctgtcgaacgcgccgtcgatgcggatataggcgcgggcacccgcggtttcgacgaagcctgagggcgccacggcgttttgtgcggcgagggcggcgaagatctgttcgggcttgatgcccagggtcgccaggcgctcataggaaaactccacaaacacacgctgggcctgttcgccgaggatattgaccttcttcaccccgggcaggttgagcaggccctggcgcaattgttcggccatttgcacctgctggcggtggggcaggtgttcggcttccagggcgtacaacgcaaagtacacatcggaatattcatcgttgaaaaacggcccgatcacgcccttgggcaattgcgcggcttcgtcgctgagctttttgcgcgtctggtagaacagcgcctggatctcgctcgggcgtgtggactccaggaaggtcatgcgcatcgacacaaagcccggctgggcgatggtctcgacgcggtcgtagtagtccagctcttgcaggcgtttttctaggcggtcggcgacttgttcctgcatttcctgggcggtggcgccgggccaggcggcggtgatggtcatgaccttgacggtaaacgaagggtcttcggcgcggcccagcttgctgaatgcgaagaccccggcgacgaggatcgcaatcagcaaaaacagggtgacggcgcggtgtttgacggccagttcggagaggttgatcccgcgcatactcattgatcctgctgacggttgagggccagcgcctgggcgggcagcaagcgcaccgtgtcgccgctgtgcaacaggtgagcgccgagggcgacgatggtttggccgggtgttacgccgctgtcgagcaaggcgtcttcctggccgaggctggcgactttcaccggggcgaagctgatcttttggtcatcgccaatcagccagacgcccgtgccttgccccgcatcctgcaaggcgccaatgggcacgcgggtttgcagaggctggccgttgccttgcaggcgcacggtgatggtggaaccgagggcgaaacgctcgaccgaaccctgcagcacataacgtgcccggtaggtgcgggtgaccgggtcggcgctggcggacagctcgcgcagggtggcggtcacggcctggtcgggtgcgccgaaggggaatgccaaggctttttgcgcggccaggtcacgccggttctccggcaggttgacgatggcttcacgggcaccgtcatgggccaggcgcgcgacgatttgcccttcggccaccacctgtccgcgatcggccagcacatcggtgatgatgccgtcgccatcggccttgagcaccgaatacgtgcgacggttttcgatctggctggcgtccgattgcgccgcggccagttcggcctgggcgacgcgcaggttggtggccgactggtcgaagatctgccgcgacaccgcgccggtactggccaggcgctggtaacggttttcatcgtcacggcgctggcgcagttgcgcctcggcggcgttgacgcggttcttggccgaacgcagcgccagttcgaagtcgccgatgtccagtaccaacagggtgtcgccacgggagacatgctggccggggtcgaccttgcgctcgatcaccttgccgctgacccgaaagcccaggttgctttcagtgcgtgctgccaccacgccggtataagcgctttgctgggtgccggcggcttcgaccttggcggcgagtaccggacgcggcactggtacctgagcggtatcggccttgctgttgcagccattaaggaacatcaacagggccaggggtgtgagaagacgcagggggagagggggcatggcgaactccggaaaccattgtgcaaaaaattacgggcgtaattttttgcttatattatggttgaaatataaattaatccagtccccagataatccccgtcgctcttgccccaccactcggcacctcgcttaggctcggtgtgcccgtaatccgccggcatccctgccggtttaccccccaaatccctgtcgaattccggccagcgtggtttgacggggcgcctaagatcaagatcaaaagcaggtcaagatcaagagcggctcgcttcgcatcgtgaagagtctgcgcgttatggcatgacaatcgctgaatttcccaccaccctggaagccgcgcgcggttgccggcaactgaacatgaaagtcttgatgggcgcgccgaacgtggtgcgtggtgggtcgcactcgggtaatgtggccgccgccggcctggctggcgagggattgctggatatactttccagtgactactacacggcgagcctgttgcaggcggcgttcgtactgccgatcaacaagatggcggtgatctttgccgcgcagtgcagatgatcagcctggcgccggcacaggcgcgggcttgaaggaccgaggtgaaatcgccattggcctgcgtgccgacctggtgcaagccaggagccgcgaagggctgccgatggtgcaacaagtctggagacaagcgaagagggtgttttgatggcaggcaggttgatctatctcatcgggccatcgggttcgggcaaggacagcctgctggatgccgcgcgtccacgcctggtcgagcgtggctgccgtatggtgcggcgcgtgatcacacggtcggcagaggcggtgggcgaagcggcgcaaggggtgagcccggagcagtttgcgctgatggaagccgagggcgcatttgccttgagctggcaggcaaatggcttgtcctatggcatccccagggaaatcgacgattggttggccgctggggacgacgttctggtcaacggctcccgtgctcacctggcgcaggctcgtgagcgttacccgacgtcgttggtattgctgctgacggtggaccaagcggtgttgcgccagcgtttgatcgcgcgcgggcgtgagtcattggccgacatcgaggaacgcctggcgcgcaatgcgcggttcactgccgagttgattgcgggcaatggggcgggcttgttcgtgttggataactctggcccgttggcacataccgtcgagcgtttgctgtgctgcctggaccacgggcgcacggtatgcgcttgacgctgctgggcaccggtgatgcgcggcaggttccggtgcatggctgcgagtgtgctgcgtgcgggttggcgcgcagtgatcaaagccgccccagccgcaggtgccgcgtaatcacaatgacctgacgctggcgctgcagagcatcgaagacaccggggcgcagttggggggggctgacccatgtggggcatacgttggatacgtggttgctggcgcatcgtcatgagttgccccgacatgtctcggtaggttgggacaatcgagtcgtgtaaggcgtggccttgttagcaatcagacaagaagcttgatgttcagtttgttttttccagtgtgtttgattgtttttctggatatttgaagcgtgtcgcttgattgagtcaagtttgttgtttgcactttttttttcttcggtggcatcaaggtttgagagtacttgggggatgcgagtattccacctcgaataaaacatgtgtggttttattactgccatgtttaatggtgggttgttgaaatgaaatgacggtggtgaaggtcttttcaatgtgggagctttatcgggctgacaacggagcagtcggcatcggtaactcgcatatatggacggttaactttccactgttcagagtatcaaagcacatgcatatccctgttaggcagtcttcttactcgcgtccttcagataagttacagcccgatctttcacccgatgaacaccaagttgttctctgggccaacaataaaaaatctttcaccacggatcaggccgcgaaacacatcacccgcggtggcttcaagtttcatgatcgcaacaatgatggaaaaatcgtcgtgggttataactttgcgggcggcttcaatgcggctcagaaagaacgggccaggcaagcccttcagtactgggcggatgttgctaatatcgaatttgttgaaaatggcccgaacacggatggcacaataagcatcaagggtgttccgggttcggcaggcgtcgcggggttgcccaacaaatataattcgaacgtccaggccaatataggcacccagggtgggcaaaacccggcgatgggcagtcacttcctgggcttattgatccatgaactggggcataccctggggctgagtcatccaggtaaatacgacggccagggtttcaattacgatcgggctgccgaatatgcccaggacaccaaggctcgcagtgtcatgagctattggacggagactcatcagccggggcacaattttgccgggcgcagcccgggtgccccgatgatggacgatatcgccgccgcccagcggctctacggcgccaacaccaaaacccggaataccgacaccacctacggcttcaattccaattcaggccgggaggcttatagcctcaagcaggggagcgacaagccgatcttcaccgtctgggacggtggaggtaatgacacgctcgacttctccgggttcacccagaaccaaaccatcaacctcaaggctgagtcattctcggacgtggggggcttgagaggaaatgtgtcgattgccaagggtgtgagtgtggaaaacgccattggcggtacaggcaacgataccttgacggggaacgagggcaacaatcggctcacgggcggcaagggggccgataagctgcacggcggagctggagcagacacgtttgtttaccgccgcgccagcgattcaacgccgcaggcaccggacatcatccaggacttccagagcgggagcgacaagatcgacctgaccggtgttgttcaggaggcggggctcaagtcgctgagcttcgtcgagaaattcagcggcaaggcgggcgaggccgtgctcggccaagacgcgaaaaccggccgtttcacgttggcggtggacacaacgggaaatggtacggcggatctactggttgccagccaaagccagatcaaacaggcggatgtgatctggaacggtcaggcgccgacagtgacgccaacgcctgaacccactgtggtgcctgtgtcggatcccgtgccgacccctacttcagagccgactgaacctgaacccacgcctgagcccgccccttcgcccgtcccgactccacggcctggaggagggtttatcgggaaaattttttcatcattcaaggggttcataaaaaaagtgtggtcgatattcaggtgagcccagtcactattcgctaaccccccccgacaagcctgcccaggcaggcgtctgtgtgccaggcaacgacctcccgtggggttctcagtccagggaaccccacgattgcactagaacctttctcttacttctgaccgtatacgcgtgtggcgctgcgtgcctgcttatcaagtgagcatggctactttcaagccacgttcatgtcgtgtttttttcaccaaactatcaggggttggtgatgccttccggttttttcagttattcaaaactcccgttgactcactcactgggtttattacctgtgcgttattcatgttcccgtttcagaggtgtcggactgatcgcctgttgcagtgcattgaatgactcatgtgcggcagacggaagtcgctgtatgtggaatgctgattttttccttcatgttctattctattgttcgccattcaagttggtagtcgcctgggggacgtgaaaaatatgagggcggatgcatattcaattgcgtctcaggttttgtctggttgtgagttatgctttgcaataaatatattttttagtttgttttagtatttttatctcttgtatatcaacgggttgtaatttttttgaacagcgatttgagttttgaggtttcaggttttttcggttgtaagtctaaagtgtttttaaattttagaatgtgtcctggtgaattaattggtcgctggcgtgattacctttagcatgcgaatttaagggggtgccgataactactgctgctcttgttgggcggaaatcggtatctcgaatatgttgttttaccgttcgagtctgatttttatgaggactttggtttatgagagtgccaggaccaaccgcaacgaattctaatgcagggcaggtgccagatccgaggagtggcatcagcccggagggccctacgcaggtatatacactaaacagcaaaaaaaccgtcttcactacggaacaggccgggaaacatatcacccgcagcggtttcaagtttcatgacagtaacggtgatggcaaaaccacgttgtcctatcgtgtttccaagggctttaccccacagcaggcagatcaagccaggcaggcactgcaatcctggcaggatgtcgctaacgtcacattcactgaaaaaaggcagggggctgacggccatatagatatcaatgagatgcacggaacctctgggggtatggcctcactccccaaccgctatatgagtcaaactttcgcaaatgtcggaacagcgaatgcaggtgcaaaccctccacggggtcattattttcgcgaagttctagttcacgaaataggccacaccattgggctggaacacccgggggactatgatggctctggtaactatggacgggacgcagcgtatgccggggatactcgagcgcgttctgtgatgagttactattcggaaaaaaaccagccgggacatgatttcaaatcattgaacccctctgcgccgatgatggatgatatatcggccgttcagaaactctatggggcgaatactaaaacgcgtaataccgatacgacgtatggatttaattccaatacaaaccgtgaagcctatagtttgaagtcggctaacgacacacccattttctgtgtgtgggatggtggtggtaatgacacattggatttctctgggtattcacaccatcagaaaatcaacctcaatgccgagtccttttcggatgtaggggcgttgaaaggtaacgtttccgttgccaagggcgtcacgctggaaaatgcagtgggcggtaagggcgacgacacacttatcggtaatcatgttgccaatcgcctcaaagggggggcgggggccgacagactgtctggggggggcggcgcagatacctttgtttacgaccatgccagtgattccaccccggataaccctgatgtcatcctggattttgcgagtggcgcagacaagattgatgtatccgcagtccttaaaagagcgaatgtcagtgctctcaagttcgtcgatcgcttaactggccaacccggccaggctgtgatgagttatgacgagggccgcaacgaggggagtctggccctggatctgacaggcaacggcaaggctgatctattaataaaaagcattggccagataaaagctgctgatatcttggcgcacggcgatacaaccgcgccaaaccctgaacccaaagatcccaagccgcagccgcgccctcaacccgaggagcccaaacccaagcctgagtccaaaccgaaggagccaaaaccggaggaaccaaaaccgcgtccggactcgtgtgaaccaaagccgcgtccggatccgtgcgagccgaagccgcgtccggattcgtgtgagccaaagccgcgtccggacccgcgcgagccgcagccgcgtccagatccacgcgaaccgcagccacgtccggacccgcgcgagccgcagccgcgtccagatccacgcgaaccgcagccacgtccggacccgcgcgagccgcagccgcgtccggatccacgcgaaccgcagccgcgtccggacccgtgtgagccgcagccgcgtccggacccgtgtgagccacagccgcgtccagacccacgtgagccgaggccgcgtccgaacccacgtgaaccgcagccacgtccggacccacgcgagccgcagccgcagccacgtccggacccacgtgaaccgtacccaggtccagacccacgtgaaccgaggccgcgcccgcacccacgtgagccgaggccgcgtccgaacccacgtgaaccacagccgcgtccagacccacgtgaaccgcagccacgcccggacccgcgtgagccgaggccgcgtccggacccaagtgaaccgcagccacgcccggacccgtgtgagccaaagccgcgtccggaaccatgtgagccgagaccgcgtccgaacccacgtgaaccgcaaccacgtccggacccgtgcgagcctaaaccaacccctcgcacagatccttgcgagccgaaagctgtcactcgaaacgtaaggccagcctatggcttgagtgcccattcaggcgactaccgggcgatgcaggcgccagcctttgatagtcgtcatttccagggcgggcttgcaggggaattcattcgacgtcagaagcgcgctgaatagattcaagtcgctctttatgagtgaaacataacgtcaagtttaagtgctcacaacaagtcatggcttgttattcgttaataacgccgttttttgatgcgtgcgtaaaagtttgagtagtcaatatagagactggctatttaagagttcacgggtgttttacttgtgaagtgttgtgttgttgtttttaactaactgagaaaacgtaattatgattaatgcacctgcatccgctgcaaattaccatatgcccacgccgaacgtgacccctcagccgtcaccgttggctcatcctggcaacccaggcgacagtgacgccgtgaagtcctctcatgccgatgcgaactcggcggcagacaaccaggcctcgacaggatccaagttgcttaatctttccgctccgctggtaggtgaccgcactggcctgcagcgactgtatggatcgagcctgaactccggactgcttcaactaggggaagtgaattctggcaaagtggttatcgctcgttgttccccgaaggcagaggaagataccaaaccggcagcggatgagcccaagccgaatggtgacaccaagccagtaacggataagcccaagccgggcggcttctccacgccagtaacagataggcccaagccacgcggcggcaccaaggagccggtggttgagcagcccaagccagagggcaccaagcagccagtggttgagcagcccaagccagagggcaccaagcagccagtggtagatcagcccaagccagaaggttcagcgtaacggtggtggtgttatcggtacccggtgtgtccgtaacggtggtgttcaccgctgtagtgccagggaccaggttttcaaagtgctcgccgccagtgacgcccttgatggcggtggtgacggtttgatcgcccttgtacacgtcatccggtgccaagaccgaaacagtgccgctggactggttcacaccaatggtgatggtttggccgttatccagggtgacggtcaacgggttggtgatgttagtcaccggcgcgccgtttttatccacaaggctggcggtgtaaacgatattgccgccttcacccacggtagtcgtggcggtcaggaccacatcgactttgtcgatggtgtcgttgatcgtggtcgttgcgccgttgcctgcaacttccagtttttcgaagttgccgccagtggtttcggtgatctggacggtctgcgtgctcttatcgatgaacacatcatcggtaggtgcaggcacggtcacggtgccgacggtctcgccagctttgatggtgatgtttgacccgttgtcgagtttcagcgtgacgtcggtaccggccttattgctcaaggtcgcggtgtaggtgatctggccaccttcgttaacggtacttggcgcagtcagcgtaacggtggtggtgttatcggtacccggtgtgtccgtaacggtggtgtttactgccgtcgtgccaggaaccaggttttcaaagtgctcgccgccagtgacgctcttgatggcggtggtgacggtttgatcgcccttgtacacgtcatcaggagcaagaaccgaaacgctaccgctcgattggtttacgccgatggtgatggttttaccgttatccaaagtgacggtcagcgggttggtgatgttagtcaccggcgcgccgtttttatccacaaggctggcggtgtagacgatgttgccgccttcaccaacggtagtggtggcggtcaggaccaaatcgactttatcgatggtgtcgttgatcgtggtggttgcaccgtcgcctgctacttcgagtttttcgaagttgccgccagtggtttcggtgatcttgacggtttgggtgctcttgtcgatgaacacgtcatcggtaggtgcaggcacggtcacggtgccgacggtgtcgccagctttgatggtgatcgaagaaccgttatccagcttcagggtgacgtcagtaccggccttgttgctcaaggtcgcggtgtaggtgatctggccaccttcgttaacggcacttggcgctgtcagcgtaacggtggtggtgttatcggtacccggtgtgtccgtaacggtggtgtttactgccgtcgtgccaggaaccaggttttcaaagtgctcgccgccagtgacgcccttgatggcggtggtgacggtctggtcgcctttgtacacatcatccggtgcaagaaccgacacgctagcgctggattcattcacaccaatggtgatggtttggccgttatccagggtgacggtgagcgggttggtgatgttagtcaccggtgcgccgtttttatccacaaggctggcggtgtaaacgatattgccgccttcacccacggtagtcgtggcggtcaggaccacatcgactttgtcgatggtgtcgttaatcgtagtggttgcgccattgcccgcaacttcgagtttttcgaagttgccgccagtggtttcggtgatctgcacggtttgggtgctcttatcgataaacacgtcatcggtaggcgcaggcacggttacagtgccaacagtgtccccagccttgatggtgatcgacgagccgttatccaacttcaaggtaacgtcagtaccggccttgttgctcaaagttgcggtgtaggtgatctggccaccttcgctcactgcgtttggcgcagtcaacgtgacagtcgtagtgttatcggtacccggtgtgtcagttacagttgtagtgactttatcggtccctggaaccaaattctcgaagtgctcgccgccagtcacaccttggatggcggtagtgacggtctggtcgcctttgtacacatcatccggtgcaagaaccgacacgctagcgctggattcattcacaccaatggtgatggtttggccgttatccagggtgacggtgagcgggttggtgatgttagtcaccggtgcgccgtttttatccacaaggctggcggtgtaaacgatattgccgccttcacccacggtagtcgtggcagtcaggaccacatcgaccttgtcgatggtgtcgttgatcgtggtggttgcgccgttaccagcaacttcgagtttttcgaagttaccgccggaagtgtcagtgatcttgacggtctgggtgctcttatcgatgaacacgtcatcggtaggcgcagggacggttacggtgccgacagtgtcgcccgccttgatggtgatcgacgaaccgttgtcgagtttcagcgtgacgtcggtgccggccttattactcaaggtcgcggtgtaggtgatctgaccaccttcgttcactgcgctaggcgcggttagcgtgaccgtcgtggtgttgtcagtacccggtgtgtctgtgacggtggtgttcaccgccgtcgtgccaggaaccaggttctcgaaatgttcgccgcccgtcacgcctttgatggcagtggtgacagtttggtcgcccttgtacacatcatccggcgccaagacggaaacagtgccgctggactggttcacaccaatggtgatggtttggccgttatccagagtgacggtgagcgggttggtgatgttagtcaccggggcgccgtttttatccacaaggctggcggtgtagacgatgttgccgccttcgccaacggtagtagtcgccgtcaggaccacatcaaccttgtcgatggtgtcgttgattgtggtggttgcgccgttacctgcgacttctaacttctcgaagttgccgccagtggtttcggtgatctgcacggtttgcgtgctcttatcgataaacacgtcatcggtaggggcaggtactgtcacggtgccaatggtttcgccggctttgatggtgatcgacgagccgttatccaatttcagcgttacatcagtgcccgctttgttggaaagcgtagcggtgtacgtgatctgcccaccctcattcgcctcggtcggagccgtcagcgttacggtggtggtgttgtcggtgcctgggttatcggtgacagtggtgttcactggcgtagtgccagggaccaggttctcgaagtgctcgccaccagtcacgcctttgatggcggtggtgacggtctggtcgcctttgtacacgtcatccggcgcaatggtggtgatggagccgctcgactgatttacaccgatggtgatggtttggccgttatccagagtcacggtcagcggattggtgatgttagtcaccggcgcaccgtttttatccacaaggctggcggtgtaaacgatattgccgccttcgccgacggtggtggtggcagtcagaaccacatcgactttgtcgatggtgtcgttgatcgtggtggttgcgccgttacctgcgacttcgagtttttcgaagttaccgccggaagtgtcagtgatcttgacggtctgggtgctcttgtcgatgaacacgtcatcggtaggcgcagggacggtcacagtgccgacggtttcgccggccttgatggtgatcgacgaaccgttgtcgagtttcagcgtgacgtcggtgccggccttattactcaaggtcgcggtgtaggtgatctggccaccttcgttcactgcgtttggcgcggtcaacgtgacagtcgtagtgttatcggtacccggtgtgtcagtcacagttgtagtgactttatcggtccctggaaccaaattctcgaagtgctcgccgccagtcacacccttgatagcggtggtgacggtctggtcgcccttgtagacgtcatccggcgctaccgtggtaacggtgccactcgactgattcacaccaatggtgatggtttggccgttatccagagtcacggtcagcgggttagtaatgttggttactggcgcaccgtttttatccacaaggctggcggtgtaaacgatattgccgccttcgccgacggtggtggtggcagtcagaaccacatcgactttgtcgatggtgtcgttgatcgtggtggttgcgccgttgcctgcgacttcgagtttttcgaagttaccgccggaagtgtcagtgatcttgacggtctgggtgctcttgtcgatgaacacgtcatcggtaggcgcagggacggttacggtgccgacggtgtcgccagctttgatcgtgatcgaagaaccgttatccaacttcagggtgacgtcagtaccggccttgttgctcaaggtcgcggtgtaggtgatctggccaccttcgtttgcttcggacggagccgttagtgtaacggtagtagtgttatcggtgcccggagtgtccgtcacagtcgtggtgactttatcggtgccaggcaccaggttctcaaagtgctcgccaccggtcacacccttgatagcggtggtgacggtctggtcgcccttgtagacgtcatccggcgctaccgtggtaacggtgccactcgactgattcacaccaatggtgatggtctgaccgttatccagcgtaacggtgagcgggttggtgatgttagtcaccggtgtaccgtttttatccacaaggctggcggtgtaaacgatagtgccgccttcgccgacggtggtggtggcagtcagaactacatcgaccttatcgatggtgtcgttgaacgtggtagtcgcaccgttgcccgcaacttccagtttttcgaagttgccacctgtggtttcggtgatctgaacggtctgcgtgctcttgtcgatgaacacgtcatcagtcggtgcaggcacggtcacggtgccgacagtatcgccagccttgatggtgatgcttgagccgttatccaacttcaacgtgacgtcagtaccggccttattgctcaaggtcgcggtataggtgatctggccaccttcatttgcttcagagggggcggtcagtgtcacagtggtggtgttatcggtgcccggagtgtccgttacagttgtagtggctttatcggtacctggaaccagattttcaaagtgctcgccaccggtcacgccgctgatagcagtagtgacggtctggtcgcctttgtagacatcatccggggcgacgttggtaacggtgccactcgactgattcacaccaatggtgatggtctgaccgttatccagcgtaacggtgagcgggttggtgatgttagtcaccggcgcaccgtttttatccacaaggctggcggtgtaaacgatagtgccgccttcgccgacggtggtggtggcagtcagaaccacatcgaccttatcgatagtgtcgttgatggtggtggtcgcaccgttgcctgcaatttccagcttctcgaagttgccgccagtagtctcggtgatcttgactgtctgggtgctcttgtcgataaacacgtcatcagtcggcgcaggcacggtcacggtgccaacagtgtcgcctgccttgatcgtgatcgaagaaccgttatccagcttcaacgtaacgtcggtccccgccttgttggaaagcgtagcggtgtacgtaatttgcccgccctcattcgcctcggtcggcgcagtcaacgtcacggtggtggtgtcgatcgaatcggtgatcgtggtgactgccggtgtggtactcggcaccaggctttcaaaattgccgccagtcgcgctggtaatggtggtgctgaccgtgctgccgttgacatagacatcgttgggcgccgtgtctacgaccacgctgccgacggactcgccggccttgatagtgatcaccgagccattgctcaaggtgacgttcaccggggtttgtgccgggttggtcagcgtggcggtgtaggtgatctgaccgccttcggtcacggtcgaacctgcggtcagggtgaccgtggtggcatcgatcgaatcagtaatggtggtgactgccggcgtggtgctcggtaccaggttttcaaagttgccgccggttgcgccggtgatagtggtgctgacggtcgaaccgttgttgtaaacgtcgttggccggagtatcgaccaaccatcaagtgaagatccgcggttttcgtatcgaactgggggaaatcgaagcgcgcttgcgtgagcaagccagtgtcggtgaaaccgtggtggtggcccaggaggggccgaccggtaagcaactggtggcctatgtggtaccggccgacgccagcctggccgacccggttgagttccgtgacgccctgcgtcgtggcctgaaagccgacctgccggactacatggtgcccagccacttcgtattcctggcgcagatgccgctgacccccaacggcaagctcgaccgcaagggcctgccgctgccggatgcgagccagatgcagcagcagtacctggctccgcaaaccgagcttgagcagcagatcgccacgatctgggccgacatcctgcacctgccgcaagtgggcctgaacgacaacttctttgacgtcggtggccactccttgctggcgatccagattacctcgcgggtgcaggccgagctcggcctggacgtaccgttgatggaactgttccagaccgaatcgctgcgcgcctacgtgcaggccgcagccactttccgcgccggcagcgtggaagattttgatgaccttcgtgactttttgagcgaactagaggcgatttgaaccatgctttccaaccctaatattgacctggtgtcgcgctttcttcgcttgcctctggagcagcgccagcagttttaccagcgcctgcacagccggggcatgagtttcgctcaattgccgattgctcccacccgccacgacagcgacacaccgacgttgtcttacgcccaggaacgccagtggttcctctggcaactggacaaggacagcaccgcctatcacatccctggcgccctgcgtttgcacgggcacttggacctggccgcgttgcaacgcagtttcgacagcctgctggcccggcatgaaagcttgcgcacgcaactggtcgaggacggtgaacgcctgtggcaggcagtgatgccgcaggcgcgggtgcagatccagcaggcgcacgtcgatgaagcacagttgatggcgcgggtggaagaggaggtggcgcggccgttcgatttgcaccaggcgccgttgttgcgtgtgacgctgttgcaactggccgaggatgaacatgtgctggtgatggtgcagcaccacattgtctccgatggttggtcgatgcaggtgatggtagaggaactggtgcagctctacgccgcccatagccagggccatgacctgcaactcccggaactgccgatccagtacgccgactacgcgttgtggcaacgcggctggatggaagccggggaacaggcgcgccaactcgcgtattggcaggccctgctgggcggcgagcaaccggtgctggaattgccgctggaccgcccgcggccggcgcagcaaagccatcgcggtgcaagcctgcaggcgcatctgcaaccgacgctggtggcggggctcaagcgcctggcgcagcaagagggcgtgaccgcgttcatgctgctgctggcgtcgttccaagccttgttgtatcgctacagcgggcagtcggatatccgcattggcgtgccgaatgccaaccgtaaccgcgtcgaaaccgagcggctcatcggcttcttcgtcaacacccaggtactcaaggctgaccttgacgggcagatgagctttgccgagctgctgcaacaaaccaaacgccgcgccctggaggcccaggctcatcaggacctgccattcgagcaactggtggtggcattgcagcctgaacgcagcttgagccacaacccattgttccaggtgatgttcaaccaccagaccgatgcccagggcgaccgggaaggccagcagttaccgggcctgcgtgtggtggaactggattgggacagccagaccacccattttgacctgagcctggacacccatgaatccgccgacgggctttgggctgcgctgacctacgccaccgacctgttcgatgcagccaccatcgagcgcttggcgcaacactggcagaacctgctgcaggcggtggtgagcgcaccccgcagccgcctctgcgagctgccgatggtgggtgccgctgagcaacacaggatgcttcaggactggaacactccggctggtgtcaccccctttgaggctgtgcaccggctgtttgaagcccaggctgatcagcagccggaacgtcaggccctggccctgaatgagcaggccctcagctatggggaactgaaccgtcaggccaaccgcctggcgcattacctgctggcccagggcgtaggccctaaagcgctggtggggatcgccgtggaacgctcctttgccatggtggtcagcttgcttgcggtgctcaagacgggagcggcctatgtgccgctggaccctgagtacccccgcgaacgtctggtgcatatgcttgaggacagtggtgtgggcctggtgttgacccaatcccacctgcatgggcgcctgccgttgccgacccaggtgctggcggtggacatcgaccgggtccaggcgcagttggcgttgtgtgccgacgataatttaccggttgatgtcgagccccagagcctggcgtatgtgatctacacctccggctccacaggcaagcccaagggggttgccatcagccatgctgcactgagtgagttcgctggcatcgcggcggattactcgcagctggttgcccaggaccgagtgttgcagtttgccaccttgaacttcgacggtttcgtcgagcagctatacccagccctgaccctcggcgccaccgtggtactgcgtggcccgcagttgtgggacggtgccgagctgtaccgacagatcatcgcccagggtattaccttggccgacttgcccaccgcctactggaagctgttcctgcaagattgcctggcagcaggcccaaggacctatggtgccttgcggcagatccatatcggcggcgaagccatgccgttggatggcccgctgttgtggcagcgcgccgggctcggccatgtgcgcttgctcaacacctacgggcctaccgaggccacggtggtttccagcgtgctggactgcactgacccgagcgctgtcagcgccgtcggtgccagccccattggccgggcgctgccagggcgtggcctctatgtgctggaccgcgacctgaacctgctgccgctgggcgccgtgggtgaactctatatcgccagcgccagcgccaatggcttggcccgtgcgtatttgcagcggccaggcctgaccgccgagcgctttgtcgctgacccgttcagcccatccggcgagcgcctgtaccgcaccggcgacctggcccgctaccgagccgatggcgtggtggagtatgtcgggcgggtcgatcaccaggtcaaggttcgtggttttcgcatagaactgggtgagattgaaactgtgctgctggcccaggacagcgtgcgtgaagcgctgttgctggctgccgacaaccaactgctggcctacctggtacctgcgcagacgctgtctgaaaccgagtgcgccgaggtgggcgaacagttgatggccaccttgcgcgaccacctacccgactacatggtgccggcgcacctgatctttctcgaccgcatgccgctcaaccccaacggcaagctggatcgccaggccctgcccaagccagatgccagcgtggaacaacaggattggcgggcgccggtcaccccgttgcaacaacaggtggcggcgatctgggcggctattcttggagccgaacgtgtgggcttgaaccagcacttcttcgaactgggagggcattccctgttggcgatgcaggtggtgtcacgcatccgccagaccctgagcctggaagtgccgctcaaagccgtgtttgaacacccgcggctggaggcgtttgtcgcggccttgcaagcccaggagagcccattgccaacgacgccggccctgctgccggccgggcgcgtgcagccgttgccattgtcttacgcccaggagcgacagtggtttctctggcaactggaaccccacagcgcggcgtatcacattcccagcgcgttgcgcctgaaagggcggttggacctggctgcgttgcaacgcagtttcgatagcttgctggcgcgccatgaaagcctgcgcacccatatccaccaggatcacgacggcgcggtgcaagtgattgagccgtcagtttccttgccgatcacccaggcggagatcgaagagaccgagctcaaggcccatgtagaagcgctgatcgcccagccgttcgacctgcaacgaggccctttgctgcgcgtcactttgctgcgcctggccgccgacgagcatgtgttggtattggtgcagcatcacatcgtctccgatggctggtcgatgcaattggctgtcgaagaactggtgcagctgtatgccggttatagccaaggccaggacgtgcagttgccggcgctgccgatccagtatgccgactacgccgtatggcagcgcagctggatggacgccggtgagaagcaacgtcaactggcctactggcaggaactgttgggcggtgagcagagcgtgctggagttgccgttcgatcaccagcgcccggctgtgcagagccaccgcggcgcacgcctggcgttcgagctggcgccggaactcgctcaggggctcaaggctttggcccaacagcagggcgtgaccctgttcatgttgttgctggcatcgttccagaccttgttgcaccgctacagcggccaggaagaaatacgcgtcggcgtgccgattgccaaccgcaatcgcagcgagaccgagcgcttgattggcttcttcgtcaacacccaggtgctcaaggcggatgtgcatgggcagatgagtgtcgagcagttgctgcagcacgttcggcaacgcgccctgcaagcccaggcccaccaggatttgccgttcgaacaactggtggaggccctgcaacctgagcgtagcctgagccacaacccgctgttccaggtcatgttcaaccatcagactgacgtcggccaggctcaggttcagcaccaattgccagggctgcgggtagaaggcctggactgggacagcaagaccgcacatttcgacctggacctggatattcaggagtccaccgaaggtatatgggccactttgggttatgcccaggacctgttcgaagccagcaccgtgcaacgcatggcgcgccactggcagaacctgctgcagggtatggtcgccaacccacgacagcagctcagccagttgagcttgctggatgtgaccgaacaacaacagatcctgcaactgtggaaccgcacggagtctggcttttcggccgagcgcctggtgcacgaattggtcggcgatcgcgcccgcgaaactccggacgcggtggcggtgaaattcgacgcgcaaaccctgacttacggtgaactggatcgccaggccaaccgcctggcccatgccttgatcgcccgtggcgtcggcccggaagtgcgggtggctatcgccatgccgcgcagtgccgagatcatggtggcgttcctggcggtgatgaaagctgtagaattcgcctcccgcttacgagagatcgaaagcgcaagtggttgaagttgttgaagaaatcttcgaaaacttctgaaaataaccacttgacagcaaatgaggctactgtagaatgcgcgcctcggttgagacgaaaggtcttaactaaccgctctttaacaactgaatcaagcaattcgtgtgggtgcttgtggagtcagactgatagtcaacaagattatcagcatcacaagttactccgcgagaaatcaaagatgtaaccaacgattgctgagccaagtttagggtttcttaaaaacccaaagatgtttgaactgaagagtttgatcatggctcagattgaacgctggcggcaggcctaacacatgcaagtcgagcggtagagagaagcttgcttctcttgagagcggcggacgggtgagtaatgcctaggaatctgcctggtagtgggggataacgttcggaaacggacgctaataccgcatacgtcctacgggagaaagcaggggaccttcgggccttgcgctatcagatgagcctaggtcggattagctagttggtgaggtaatggctcaccaaggcgacgatccgtaactggtctgagaggatgatcagtcacactggaactgagacacggtccagactcctacgggaggcagcagtggggaatattggacaatgggcgaaagcctgatccagccatgccgcgtgtgtgaagaaggtcttcggattgtaaagcactttaagttgggaggaagggttgtagattaatactctgcaattttgacgttaccgacagaataagcaccggctaactctgtgccagcagccgcggtaatacagagggtgcaagcgttaatcggaattactgggcgtaaagcgcgcgtaggtggtttgttaagttggatgtgaaatccccgggctcaacctgggaactgcattcaaaactgactgactagagtatggtagagggtggtggaatttcctgtgtagcggtgaaatgcgtagatataggaaggaacaccagtggcgaaggcgaccacctggactaatactgacactgaggtgcgaaagcgtggggagcaaacaggattagataccctggtagtccacgccgtaaacgatgtcaactagccgttggaagccttgagcttttagtggcgcagctaacgcattaagttgaccgcctggggagtacggccgcaaggttaaaactcaaatgaattgacgggggcccgcacaagcggtggagcatgtggtttaattcgaagcaacgcgaagaaccttaccaggccttgacatccaatgaactttctagagatagattggtgccttcgggaacattgagacaggtgctgcatggctgtcgtcagctcgtgtcgtgagatgttgggttaagtcccgtaacgagcgcaacccttgtccttagttaccagcacgtaatggtgggcactctaaggagactgccggtgacaaaccggaggaaggtggggatgacgtcaagtcatcatggcccttacggcctgggctacacacgtgctacaatggtcggtacagagggttgccaagccgcgaggtggagctaatcccataaaaccgatcgtagtccggatcgcagtctgcaactcgactgcgtgaagtcggaatcgctagtaatcgcgaatcagaatgtcgcggtgaatacgttcccgggccttgtacacaccgcccgtcacaccatgggagtgggttgcaccagaagtagctagtctaaccttcgggaggacggttaccacggtgtgattcatgactggggtgaagtcgtaacaaggtagccgtaggggaacctgcggctggatcacctccttaatcgacgacatcagctgctccataagttcccacacgaattgcttgattcattgaagaagacgaaaagaagcagcccgaaattgggtctgtagctcagttggttagagcgcacccctgataagggtgaggtcggcagttcgaatctgcccagacccaccaattttgtgtgggaaacgcctgtagaaatacggggccatagctcagctgggagagcgcctgccttgcacgcaggaggtcaacggttcgatcccgtttggctccaccactactgcttctgtttgtataaagcttagaaatgagcattccatcgttgtgatggtgaatgttgatttctagtctttggctagttcgttctttaaaaatttgggtatgtgatagaaagatagactgaacgttactttcactggtaacggatcaggctaaggtaaaatttgtgagttctcttaactgagaaattcgaattttcggcgaatgtcgtcttcacagtataaccagattgcttggggttatatggtcaagtgaagaagcgcatacggtggatgccttggcagtcagaggcgatgaaagacgtggtagcctgcgaaaagcttcggggagtcggcaaacagactttgatccggagatgtctgaatgggggaacccagccatcataagatggttatcttgtactgaatacataggtgcaagaggcgaaccaggggaactgaaacatctaagtaccctgaggaaaagaaatcaaccgagattcccttagtagtggcgagcgaacggggactagcccttaagtggctttgagattagcggaacgctctggaaagtgcggccatagtgggtgatagccctgtacgcgaaaatctcttagtcatgaaatcgagtaggacggagcacgagaaactttgtctgaatatggggggaccatcctccaaggctaaatactactgactgaccgatagtgaactagtaccgtgagggaaaggcgaaaagaaccccggagaggggagtgaaatagatcctgaaaccgtatgcgtacaagcagtgggagcccactttgttgggtgactgcgtaccttttgtataatgggtcagcgacttattttcagtggcgagcttaaccgaataggggaggcgtagcgaaagcgagtcttaatagggcgtctagtcgctgggaatagacccgaaaccgggcgatctatccatgggcaggttgaaggttgggtaacactaactggaggaccgaaccgactaccgttgaaaagttagcggatgacctgtggatcggagtgaaaggctaatcaagctcggagatagctggttctcctcgaaagctatttaggtagcgcctcatgtatcactgtagggggtagagcactgtttcggctagggggtcatcccgacttaccaaaccgatgcaaactccgaatacctacaagtgccgagcatgggagacacacggcgggtgctaacgtccgtcgtgaaaagggaaacaacccagaccgtcagctaaggtcccaaagttatggttaagtgggaaacgatgtgggaaggcttagacagctaggaggttggcttagaagcagccaccctttaaagaaagcgtaatagctcactagtcgagtcggcctgcgcggaagatgtaacggggctcaaaccatacaccgaagctacgggtatcacgtaagtgatgcggtagaggagcgttctgtaagcctgtgaaggtgagttgagaagcttgctggaggtatcagaagtgcgaatgctgacatgagtaacgataatgggtgtgaaaaacacccacgccgaaagaccaaggtttcctgcgcaacgttaatcgacgcagggttagtcggtccctaaggcgaggctgaaaagcgtagtcgatggaaaacaggttaatattcctgtacttctggttattgcgatggagggacggagaaggctaggccagcttggcgttggttgtccaagtttaaggtggtaggctggaatcttaggtaaatccgggattctaaggccgagagctgatgacgagttaacttttagttaacgaagtggttgatgccatgcttccaagaaaagcttctaagcttcaggtaaccaggaaccgtaccccaaaccgacacaggtggttgggtagagaataccaaggcgcttgagagaactcgggtgaaggaactaggcaaaatggcaccgtaacttcgggagaaggtgcgccggtgagggtgaaggacttgctccgtaagctcatgccggtcgaagataccaggccgctgcgactgtttattaaaaacacagcactctgcaaacacgaaagtggacgtatagggtgtgacgcctgcccggtgccggaaggttaattgatggggttagctaacgcgaagctcttgatcgaagccccggtaaacggcggccgtaactataacggtcctaaggtagcgaaattccttgtcgggtaagttccgacctgcacgaatggcgtaacgatggcggcgctgtctccacccgagactcagtgaaattgaaatcgctgtgaagatgcagtgtatccgcggctagacggaaagaccccgtgaacctttactatagctttgcactggactttgaatttgcttgtgtaggataggtgggaggctttgaagcgtggacgccagtctgcgtggagccaaccttgaaataccaccctggcaactttgaggttctaactcaggtccgttatccggatcgaggacagtgtatggtgggtagtttgactggggcggtctcctcctaaagagtaacggaggagtacgaaggtgcgctcagaccggtcggaaatcggtcgtagagtataaaggcaaaagcgcgcttgactgcgagacagacacgtcgagcaggtacgaaagtaggtcttagtgatccggtggttctgtatggaagggccatcgctcaacggataaaaggtactccggggataacaggctgataccgcccaagagttcatatcgacggcggtgtttggcacctcgatgtcggctcatcacatcctggggctgaagccggtcccaagggtatggctgttcgccatttaaagtggtacgcgagctgggtttagaacgtcgtgagacagttcggtccctatctgccgtggacgtttgagatttgagaggggctgctcctagtacgagaggaccggagtggacgaacctctggtgttccggttgtcacgccagtggcattgccgggtagctatgttcggaatagataaccgctgaaagcatctaagcgggaaactagcctcaagatgagatctcactggaaccttgagttccctgaagggccgtcgaagactacgacgttgataggttgggtgtgtaagcgctgtgaggcgttgagctaaccaatactaattgcccgtgaggcttgaccatataacacccaagcaatttgactactcgaaagagcatcagattgcggtgtgtgaagacgaaaatgaaccgaaagttcgacgctcacaaaacaccgagatctatcacctacccaatttgctgaagcgaggccaactggccacgactcagtacccgaatttcttgacgaccatagagcattggaaccacctgatcccatcccgaactcagtgtaggagcgagcttgctcgcgaaaaacgtcaacgataacgcgtgcttcctgaataaacgcggtgcctgtggttttttcgcgagcaagctcgctcctacagaaaagcctgctccaaggggggggttatttgtcctggcgggcatccagggttttttgatgctcggccaggaacggttgctctgcggggtcaaaacgatcaatcccggcggtgaagcggtgccagtaggggtacaacggctgacggcgagtgacagcttcgatgcgcgccgactgcgcttcggtgagtttcagttcagtggccgccaggttgtcgcgcaggtgtgcttcggtacgggcgccgacaatcagcgaggtgatcccggggcgatccttgagccaggccaggcaggtgcgggcgaccgagacgccgtgctcatcaccgacggcggcgagggtctcgataatgtccagcgcacgttcctgatcgtggacatagggttccggccaaccgctgccctggcgggtattggccggcggcttgtgcccgcgtcgggtcgtgccggtcagcaggccttcgcccatcggcccccacaccagcgtgccgatctgctggtccagggccaacggcagcaactcgtactcggcctctcgggattccggggtgtagtagatctgttgggtaattggcttgagcatgccgtgcagttcagccttgcccagggttttcatcatttgccaggcggtgaagttgctggtgccgaagtagcggatcttgcccgaacccaccaacaggcgcagggcttccagggtctcttcgatcggcgtcataccgtcccagttgtgcagttggtacaagtcgatgtggtcggtgcccaggcgcttgaggctggcttcgcacgcgcggatcaagtggtagcgcgatgagccggagttgttggggttgtcgtccaccgggctgcggcccttggtggccagcagaatgtcgttgcgcttgccgcccagcgccttgcccaccacttcttcggccaggccgtgggaatagagatcggcggtgtcgaccatgttcaccccggcgtcgaacgccatatcgaacatgcgcttggccaggggcacgtccaccgcaccgcatttttcaaattctgcgcgaccgccaaagggcacggtgcccaggatgatttccgataccagcaggccggaatgacccagttgtcggtactgcatgttgcctcctacttaacgttgcacgtgaaggtgtgaacgatggggagggcgatagtttgaatttttttatgaaacgctcgcgcccggcttggctgccacgccaacgatgtattgtttcgctggatgaaatgctggattgtgaatcctggtcattccgccagacagggcagcggtagagcatccctggcgtcgatacccactcatttggagcctgtcatgacccagcctgcgatcaaactctatggtttccccctgtccggccactcccatcgggttgagctgatgttgtccctgctggggctggcgagtgaatttgtcctggtggacctcaagcaaggtgcgcataaaacgcctgagtttctcaccaccctgaacagcttcggccaggtgccagtgattgatgacggcggcacggtcttggccgactccaatgccatcctgctttacctcgccagcacttatggcaacggccaatggctgcccagtgaccttgtcgggcaagcgcgggtgcagcgttggctttcggccgccgccggcccactccatgccgggcctgccacggcgcgcttggccacggtgtttggggccgaggtggacactgtcagcgcaatcaaccgtgcccatgccttgctgcgcgtgatggagcagcaactgagccagagccgtttcctcgccagtgagcagcccagcattgccgatatcgccttctacacctacgtggcccacgcgccggaaggcaatgtgtccctggccgactaccctaaggtacgcgcctggctggccagcatcgaagcactgccgggtttcgttggcatgccgcgtacggcggtggggctgcaatcgcaataacaaccgaggggcgccgatggaccgatttcatgaaatgcaggtgttcctggccgtggccgaggaggagggcttcgcggctgccgcgcgccgtctgaacacgtcgccgcccagcgtgacccgggcgattgccgccatggaacaacgcatcggcacccagttgctggcgcgcaccacgcgcagcctgcacttgaccgaagccggccagcgttacctggacgattgccgacgcatccttgccgagctggacgaagccgaggaagcggcggcgggcagttactccatcccgggcggccagttgacggtgaccgcaccggtactgtttggcgagctgtatgtggcgccggtaatgggggaatacctggaccgttttcccttggtgagtatcaacgccttactggtcgacagagtggtcaatatgaccgacgaaggtgtggatgtagcggtgcgtatcggccacctgcagccatccttgcagcaagcgatcaaggtcggcgaagtacgccgggtggtgtgcgcatcgccggcttatcttgaccaacacgggcggccccagcggcccgagcagttgcgtgaggccaagctcgtcacctcatcgtccagccaacgggtcagtgagtggacattcattgacgccggccagccgctgaaggtaccgattgagccgcgcctggtggtcaccgccaacaatgccgcgattaacctggcccgtctgggctggggcatgacgcgggtgctgtcttatcaagtcgcggcagcggtcgcggcgggtgagctggagctggtgctggaggatttcgaaccggcgccgctgccgatccacgtggtgttccagcagaacggccgcgtaccggccaaggtcaatacgtttgtggatttcctcagccatcgcctcgggcaggacccggccctgaacgcggcgacgaagcagcgcgcctgatggagcgttttcgcgatatgcagctgtttgccgcgctggccgggcaacccagcctggcgtcggcggcacgccatgcgcaggtctccggcccgaccctggtacgtgcggttgcgcgcctggaggcacgcctacgtgtggtgttgctgcatcgcagcacccgcggcgtcagcctgagcgacgcaggccaggcttaccttgccgactgcgtgcgcctgctggccgcggtggacgcggccgaggcttcggccaacggtttgcatgtgcaggcccagggcgacctgcggatattcctgccgctgctgttcagccgctatgtcatggcgccgctgttggccggctatgcggatcgctacccggcggtgcgtgtcatcgcgcattaccacgactattaccctaacctgcatgtagaggggctggacgtggcggtgctggtcggcgaattgcccagctcgtcactcattgcaaggcaagtcgggcaggtgggcactgtcctttgcgccagccccgcttacctggcgacctggggcgaaccccggcatccggctgaactcaagcagcaccatctgattgccagcaccgacccggtgcactgggatttcccgcatttcaccctcaaggctcgcgcccggctgagttgcgccactgtccaaggggcgatcaatgcggcggtgcagggggcgggcgtgattcgagccttgagttacccgctgcacgaacacctggtgagcggccagttgcagcgcctgttgcctaccttcgagttgccgccgcagccggtgcatgtggtctaccgcgaaggccgccatgcgtcgatgcgcgtgcgcagctttgtcgactactgcgtcacggcgttgcgtgagcatccggcgtttcagctggcgtaatagtggattgccctgggtgggcattctctctattacggcatgggcgcagcatcttcagtctctaaccggaggtgagcgccatgcactcgattgaaccaaccccttggcatgtcggcgaacgacacatgcaggacagtgccggcgtttctgaacgcatggccatgatcgggcccaaagtcattcgtgatcatttgcctgagcagcaccgcgatttttacccgctactgccgtatgtgatcgcgggtgtggtggacgaacagggcatcccctgggcgacgatgctggagggcgcaccaggcttcgcgcactcaccagatccgcacacgctgcagatcgacagcctgccttccaaaactgatcccgcctgggctggaataacggatggctcggccattggcctgctgggcatcgacctcaacacccgccgccgcaaccgcatgaatggccgcattggaacgcttgagcatgagggcttcgcggtcgaggtggtacacaccttcggcaactgccccaagtacatccaactgcgccccgtcgccggcattgcgcgaaaacccggcaacctggcagagcgcagcaaccgcctggacgacgcggctcaagcactgatccgccacgccgacaccttcttcgtcgccagctacgtcgacctgcacggcgaacgctcggtggacgtctcccaccgaggcggcaatacgggatttgtgcgggtgcaaggcaacgtactgaccatcccggattttgccggcaacctgttcttcaacaccctcggcaacctgcacgccaacccggtggcggggttgttgtttgtggattttgagaccggcgacgtgctgcaagtggccgggcgtacttcgttgatcctgggtgggccgcaagtggctgagttcgaaggcgcgcagcgcttgtggacggtgacggtagaacatgtggtccgccgcccggcagcattggccttgcgttggcaattcgcggaattttcgccacacagcctggcgatgggcacctggtagccaggcacgataatgccctgtaggagcgagcttgctcgcgaaaaacgtcaacgataacgcgtgcttcctgactgtaggagcgagcttgctcgcgaaaaacgtcaacgataacgcgtgcttcctgaacaaacgcggtgccctcaggctcttcgcaggcaagccagctcctacatttggccctgtggcatccgttagatagctgtcgtaagcctggcggccagcgccttggcctgcagcgccacatcggtcaccgccgtactttcccaccacatcccccgcaacggcggccccatggcgaacagtcgcgggctgacctggccccgagcatccagcaccgcccccgttgcatccgccgcgatccccagcgccaatggcccaggctggaccaacccgcgcttgagcaattgctgcggcaaaggccgggccacccggcgccagtcgtattcgatgccgctggaattgatcagcgcagcgcccacaacctgattgatcatctcttcaccacggtagcgcagcgcaatggcaaccccctcttgcgacggcatcaagcccttgaacgacgccgcatgaatccgcagccgcccttcctcctgcaagcgctccaccaattgcgcactcattggcggcgaacggtgatggtggctttcccaccaggggcgcacatgccgcacaaactggcgtttctgagcctcactggcctggctccacaggcgcgctatgtgcacgcgcaccgtgtccaacggcgcctgccagtctgtgccttgccccaacgcgagctggcattggcgtcgcacctcacgcagcaactgtcgggggctgctcaggctgtggtcggcggcgaggaagtcgttccagctcggcggttgccggcgtacatggggcaacaagccgtggcgcgaaaaaacctcgataggcccgcgatggccggcctgctccagggagaccacggcatcgaccatggtcaggcccgagccgatgatcagcacggtcgattgtgggtcgagacgagtcatcgcggggacatcccaggggtccagcgcggcggcattcaatcctgtggactcggtctgcggagtgcgcgccgccgggaacatgccagtggccaataccgcacaggcgccgcgcagttgctcgccagtatcgagagtcaacaacgccgaggtggcatcgacttgcaggtctaccccttcggcgcggatgtgctcgacgctcgatgtagaaagcgccttggcttgcgccagacgctgctgcgcgtacaggccgaaaagcccccgtggcgggaacagctcgctgatgggcacatgctgttgatacgactcgggccatcccccggcgctgatgtagtcggtgagccactgagtgaggtcgtcagcattgtccgggtcaacgctcatgcgggcggcattgccgttcagcgtatggcccaattcgaccgcgctgtaggcttcgccacgccccagttcagcgcgaggttcgactatcaggatgcgccgcgtgcccggtaggcgcagcagttgcacggccagcatcgtaccgctcaggccgccaccgatgatcagcacgtcagcgttgcgagttgattgattcatgctggttcacccttactgtttgcccagacaaatgtcatgtcccgcaccaacaacggcgcggtactgcgactcaggaccacccgcccagtatccagcacgtagctctgagatgcatagttgaacgcgacattgacagtgtgctcagcgatcaggagcctcacccgctactcgcgggcattagcatggcctgggcaattaggattgtctttgactgaaacgctgcgagagcaaggcgggccgtggcagttggcaatgaaatggagagccgatgcacagacagataccgatgttcgcagcttttggaagggtaagataaaacaatcagcagctgtttttgtcatggcgatctattgacaattatcgcactggaaacagccacgactttcgcgtgcgtccaagtctcctcgccatatgaaaacactggaaaatcacgccagaacagatggcaaggacaaacgttgcatgacttatcaaaacactcaggttagaaagccctatacgacgtgatagaccctttctccggagcgccccacaatttctcccccgcgcctcacgtaatacgaaatagttgtcgtagtgccaccacgcaatgaacgtactaatacgtcgatagtggcgcaaggattagtgacctcacgaaaactgaaccacgttccgccctccactttttgggagcaagctacctcgtcctcaagttggataccggcataggggaacacgtgcatgtaagcgagtttattctcgatatcgtgattattgagcgtcccatcagggttcaccggagtgatcgaagcatcaggcaacgtcgagccaggcaggtttgtagctggatcaggcaaaaaaatatccattgactatctccttcaataagttaactcgacttgcgctgatagcacatcaacgatatcgagaaaccaatctagcaaatatgacgaacgcttaaacctgtcaaactcaacagttgacaaacaataaaaactgtcgacagacacctgacaaattaatcaaataacgacattacgaacaaactgcaccgcgacctcactatcattgcggtagacgtggccttggcggctggcaaacataaaaaactcgccagcgctgacgattattttttcgtctcccactttcagtgtcaggtgaccttcatatacaaacaactgcacgctccacccttccggatccggctcgggacagtagcgatcccctggttccaagcgcatctcccacaattcaacttcacgtcgagcgttagccttagccagtaatacggctttgctgcccgggatctcacccgcccaggccagctcgttgatgcagctgtgatcgggagcatccggcgcctgaatcagatcactgaacgccacgtccaacgcttcggcgacacggtccagggtcgacaggctgacgttcttctcccccgcttcaatcgccaccagcatgcgccggctgacaccggacttttccgagagcgcggtctggctcaggtcggcggcatggcgcaggcgacgaacgttctggctgacgtgctgcaggaccgaggcccgttgcggattttctttgtgcactatattgctcaataggtgggtgtgcgcagtatactgcccagcgtgcggcgcattgtgcggtccgtgctttccccttgcaagaccgagccgccatgaccaccccgaactccccttcgcgtttcaaccgtttcagtaaagccgaatgcatcctggtggtgatcaccatgatctggggcggcacctttttgctcgtgcagcacgctatggccgtcagcgggccgatgttttttgtgggtctgcgcttcgcggcggcgacgatagtggttgggcttttttccttgcgcaccctgcgcgacctgaccctgttcgaattgaaggccggggtgtttatcggggtggcgatcatgttcggctatggcttgcagaccattggcctgcaaaccatcttgagcagccagtcggcgtttatcaccgccttgtatgtaccattcgtgccgctgttgcagtggctggtattgggccgtcgccccgggttgatgcccagcatcggcatcatgctggcgtttgccgggttgatgctgttgaccggcccggcgggggcttcactgaacttcagcccaggtgaaatcgctacgctggtcggtgccgtggcaatagcggccgagatcatcttgatcagcgcatttgcaggccaagtggatattcgtcgggtgaccgtggtgcaactggccaccgcttcggtgctgtcgttcatgatggtggtgcccatgggcgaggcgttgccgggcttttcctggctgctgttgttcagtgccgtgggcctgggcttgaccagtgcggtgatccaggtggcgatgaactgggcccagcaaagtgtttcgccaacccgggcgacgttgatttatgccggtgagccggtgtgggccggcgttgtggggcgaatcgccggggaacggttcccgccaatcgcgatgctgggcgcggtgttgattgtggtggcggtgattgtgagtgagttgaagacgaaggggcagaaggccgttgagcaggcagatgccttggaacaggagcgtcagggctaacctgggaacgctgtggtgcctgctctatcgtcatcgcgggcaagcccgaataccagtcagttaaggctttttgtaggagcgagcttgctcgcgaaaaacttacaggcgccgcgttcattcagcaaacacgcgttatcgttgacgtttttcgcgagcaaggacggccaggaatggcgcgtcagtcggcactggacagatgcgggcgatgaatacagcttcgaatacgacctcgatgccggcattacccgtgtgaccgacgggctgatgcggatcagcacacggcattggaacccgcagtaccagatcactcgctacgtcgataacctgggccatacgtggcagtttgagtggagcgaagatcgccaactgctcggtgcgattgacccgcaaaacggccagtggcgtttcaactatgacgcgtgcggcaacctgagcgctgtcatcgatccactgtccagaaccagcagcacgcagtggctggcgcattgggcattgcccgaggtggaaaccgacactgcgggccacagctggcattaccgctacgaccagcgtggtaactgcatcgaggaaatcaaccccctgggcaaccgtacgcgctatgtctatgacggtttcggccagcctgtacgcatcatcgatgcgatggaaaaaaccagaacattgcattggaacgagtggagccaactggtcgaagaagtggactgctcgggttatcccactcgctatgagtacgacgcgttcggcaatcaagtgacgcaaattaatgctgaaggggagtccgtgcgctatcggtacaacccccggggactacttctggagtgcctgctgccggatggtcgcatagagcaatttcaacgtagcgccaatggatatctgtcggcctatatcgaccccgccggcagctccacgcgctacgcctacaccctgcgcggtcaggtcaaacaacgttgggatgcgtataaccgcacggtcatgttcgatcatgatgcctatggccgattgctgaaactgaccaatgagaatggcgaaagctaccacttcgaatgggacgcggctaaccggttggtccaacaacaagaccttgacctgagtcgacgctgctatacctatgacccattggctgaggttgtggccttggactatctgccggggatcgaaggcgaaccggtggctccaatcaggcaccaattccagcgcgacccactaggacgcctgaccagtaaaaccaccgccgacggaaccacagtttttgagcatgatctgcgtgaccaattggtcggaataaccttcacggcccttgacggttgccagcaggtactcagtttcagctatgacccgctagggcaactgcttgaggagcaaagctctgcaggttctgtgcagcatcgttacgacgagttaggaaacttgacccaaactggattgcctgatggacggtggttgaacagactttactacggcagtggccatcttcatcagttgaatcttgacggccacgtcattagcgatttcgagcgtgatcgcttgcatcgcgaagtgcagcgtactcagggccaagtcaaaacgaatacggcctatgatcgaagtggcagggtacgttcacgccagcgccgcagcattgatcagccttggcagttgccaccattggtcgagaccgactacagctatgacccatgcgacaacctgatcggacgccgccgtaccgatcgacaactcgactatcaggaacatatgggttacgacagtaccggtcgtgtgctggtcagctatcgtcagagtcatcgcgaaacctatgcttacgacgcagccgccaacttgctcgacgctccgctgcagagtggattggtaaggtataaccggcttctcacttatcaagacaagcgctatcgatacgatgcttttggtcgcatgatcgaaaagcgtagcgccatgcatggtttacagcgctttgcctacgatgccgaacatcgactgatcgaagtccgtaaccagaaaggcgagcgggagacgctggtgcggatggtgtatgacccactgggccggcgtattggcaaaacagaacatgatcagcgtgggtttcgcttgggagaaacccgcttcgactgggatggcttgcggttgctgaaggagtatcgaaacgggcaggccagcctttatctctatgaagatgacggttacgagcctatcgcacgggtggatggcactggccagcatcaacatgtgcggtactaccataacgacctgaacggcatgcctgaacagctaacgcaaaccaacggtcatatcgtgtggcaggcgcattttcgagtgtggggcaatacctcagaagagtggcacgaagcttcttttttggaagagcaaaacgtacggttccaagggcaatatctggatcgggaagtcggactgcacttcaacacgttcaggttttatgatcccgatgttggacgattcataacgccggatccgattggactggcgggcggattgaacctttatcaatatgctcaaaacccctcgggctggattgaccccaaaggattggcgtgcggcgcttacaaagggaagctgaaccaaaaagcctcgaaaatgcccacgttgaccaaaggctccaaggagtggaaacaggccgtcctggataaccgggcagccatggctaacggtgaaaaatttcaggtcaaggtaaaatcaagctcggacgccaaagcgtttttgaaagaatcacaaggtaatatgaaccgctataaggcccatactcagagtgcgcgcgccgacggcgtagcgaagtaccctaagggctatgagcaacatatggctccagaaggcggctttggggatacaccgcacatcaagtggtacaacaatggaggggatggtcatatattttatgacgtcccgaattgatatgaaaaatgaatatcgatttgaaacactcaaaaaaatcgggttaggcccgaatgaaaacattgagcagatttcttcaatgatgctcaaaactgtcctgtcgggtaatttcactcatgtgcttgactcattgaccaagctgcgaccttttttaacctcagactgttactacgttgccaacaaactttttattaccaaaggcaagaaaaaaatcttcaaaggtgaactttgcaaatcagaaaaaaccgatctattgagtttcctggataatgccgagacctcaggcgatcttcgtgagcttttgattgcgccagtagagtcgtacccaaacggcaacataatttatattaccgaagatgcaatttacttatacacaacagaatgagtttgaaaagacgagaatggaagacatttgaaagtgctgatcacccccaacattgaattgatagaaacctcgcaactctattatgaagatgcgtctgtcatatgggttttcgacaccaattcttccgtggtccgcctcgacacatcacgcaaaccgcatacgaactccgagcattggatttcagagaattccgacctcttttcattctctgaaaacggcgacctggcttgcctggagctctccgtaccaggagaaaatcatctggctactttcaggatcgataaaacaataaccggccgcatcaaacttcataaaccggtctttaacgttctgccgaccatgctcagactatttgatcctcttggccgacagttgtcttgcttcatgcgccctcccactaaaaaagaagcgctcacccgagtcaaccttggaaaggacttcacgatactcctggcggaggatcagtatttcggttttgagctgttcaaccctctggattatttggtaggccagaatgatgctccgttggatcctgacaaccgggcgggcagcgatgaatatcgactgtttgccgcactgcttgacatcatgtcggacaacactgtcgaagcactcgataacgacatggctgccgtggccaatgaacttaaaacaaacatattgccgcatatcccatcaatcaaaagcgcctccagaaaaaacacagtccagtcctcactggaagacttcatcgactattacgcatgaacccaatagccgctcagctcgagcctgagcaatgagtgaggatctttgggccgcccgcgaaggcgacgcactgctgcacagcgaggtgccgagtggtggggcaagagcgttttgcttacttttgcgcttttcaaaagtgagccgctgtcagagcggaaccctaagtggccgttacctgaataacggatatgtacgcggtcagatccaacatcctggtcggctgtcaggccaccatcgcaggcaagccagctcccacatttggaccgaggagcgtcaggtagatagggggggccagcttcagcgcgcaaccatatttgtactcaatcaagaagccaaccatgcaaacgtctaaattccgcaaaatcggcattctggctatagcggccgtggcaatcggcctggccatttacaccgtaaacgcccccgccgacgccccccaatacctcaccgccaccgccgaacgcggcgatatcgaaaacgcggtattggccaccggcctgctggagggcgtcaaacaagtcgacgtcggcgcccaagtctccggccagctcaagtcgctgaaagtcaaagtcggcgacaaggtaaagaagggccaatggctggccgaaatcgacccgctagtcctgcagaacaccctgcgcaaagcccaggtcgatgaagaaaacctccaggcccaacgccgcgcgaccgccgcgcaactcaagcaggccaagtccgtgtatgagcgctacaaaggcttgcaggccgacgagtcggtgtcacgccaggatttcgaagacgccgaatcgacctaccaggtacaacaggccaacctgctgtccctggacgcacagatcaaaagcgcgcacatccagatcgacaccgccaaggtcaacctggcctacacccgcatcaacgcgcccatcgacggcgatgtggtgggcatcgtcacccaggaaggccagaccgtgattgccagccagttggcgcccgtgctgctcaagctggcagacctggacaccatgaccgtcaaggcccaagtgtcggaagcggatgtgattcatatcagccccggccagcaggtgtacttcaccattctcggcgaggcggacaagcgctattacgccaagctgcgcggcactgagccggcgccgcagaacttccttgaaacccagaccgccggcacgccgaagcaaaacaccgcggtgttctacaacgcgttgttcgacgtgcccaaccccgaccaccgcctgcgcattgccatgaccgcccaggtgcgcatcgtgctcgacaccgccgaggccgcgctgatggtgcccgtggcggcgctgggtgtgcgcaatgccgatggccgctacgaagtgcgggtgctggatgccaagggcaaggcggtggcccgcacggtgaagaccggtatcaacaacaacgtcaaagtgcagatccttgatggcctggccgagggcgacaccgtggtgatcggcgacgccacgcctgccgtggcggggagttgagtcatgagccagcctctgttggaactcaagggcatcactcgcagcttcatggccggcgagcgtgaattcatcgcgctcaagggcatcgacctgagcatccatgccggggaaatgctggcgatcatcggcgcctccggttcgggtaaatcgaccctgatgaacatcctcggtggcctggattacgccaccgccggcagctacaagatcaatggcatcgaaacccgctccctgggcgatgagcaactggcggagctgcggcgtgattacttcgggtttatcttccagcgttaccatttgctcgcgcacctgagcgctttgcacaatgtggaaatgccggcgatctacgcgggcaccccgcaaagccagcgccatagccgcgccggggaattgctggcacgcctgggcttgtcgggccataccagccatcggcccagccagctgtctggcgggcaacagcagcgagtgagtattgcgcgggccttgatgaacggcggtgaagtgatcctggctgacgaacccaccggcgccctcgacacccacagcggcaaggaggtgatgcgcatcctcgccgagctgcatgcggcggggcacaccgtgattatcgtcacccacgaccccaaggtcgcggcgaacgcccagcgcattgtcgaggtgtgtgatggcgagatcatcagcgacaaggccaacgacagcgtcggcctggagttgcccgccgaggcgccggtcgagccccgccgcagcggtgcgcggcgcctggtggcgagcctggggttgttcaaggaagcgttcaacatggcgtgggtggcgctgatctcccaccgcatgcgcaccttgctgaccatgctcggaattgtcatcggcatcacttcggtggtgtcgatctcggccatcggcgaaggcgccaagcgctatgtgctcaaggacatccaggccatcggcagcaacaccatcgatatcttttccggcaccagttttggcgacagccgcgcctcggccatcgagaccttgatgccctcggatgtggaggccttgaaccagctgtattacgtggacagcgccacgccggtggtggggcgcaacctgttgttgcgctacggcaatatcgacctggacgcccaggtcaatggtgtcagtgatcgctacttcaaggtcaagggcctcaagcttgaagccggcattgccttcagcgaaagcgatgcacggcgccaggcccaggtggtggtgatcgaccacaatacccgccagcgcctgttcgggccgaacatcgacccgctgggccaggtgatcctgataggcaacctgccgtgcacggtgatcggggtgacggcggacaataaaaacatgttcgccgccagcaaggccctgaacgtgtgggtgccgtacgaaaccgcggcggggcgtctgctgggccagcgtcatcttgacagcatcaccgtgcgcatcaaggacggccagccgagcaaggtggtggaagacaacgtcaataagctcatgctgcaacgccacggcaccaaggattttttcaccaacaacctcgacagcatcatgcagacggtacagaaaaccagccgctccctggcgctgctgctgtcattgattgcggtgatttctttgctggtgggcggtattggcgtgatgaatatcatgctggtgtcggttaccgagcgcacccgtgaaatcgggattcgcatggcggtaggggcgcggcaatcggatattcgccagcagtttctggtggaggcggtgatggtgtgcctgatcggcgggatcatcgggatctcgctgtcctacgccatcggctacctgttttcgctgtttgtgaaggagtgggaaatggtgttttcggtgggctcgatcgttaccgcgtttgcctgttcgacgttgatcggcattgtgttcggttttgtaccggcgcggaatgcggcgcggttggacccgatagaggcattggcaagggactgatctgtgggagcttgctcccgtgacggcctgacagccggcgcctatctccctggcgccccaggatccaaatgtgggagctggcttgcctgcgatggcggcctgacaggcgacacagttggattgtgtacatatccattgctgcggtaacggctacttagggttccgccctgacggcggctcacaaacgttaccgctcgattggtttacgccgatggtgatggttttaccgttatccaacgtgacggtcagcgggctggtgatgttagtcaccggtgcgccgtttttatccacaaggctggcggtgtaaacgatattgccgccttcgccgacggtggtggtggcagtcaggaccacatcgaccttgtcgatggtgtcgttgatcgtagtggtcgcgccgtcgcctgcaacttccagtttttcgaagttgccgccggaagcgtcggtgatcttgaccgtctgcgtgctcttatcgatgaacacgtcatcggtaggtgcaggcacggtcacagtgccaacagtgtcgcccgccttgatggtgatcgaggagccgttatccaacttcagcgtgacgtcggtgccggccttattgctcaaggtcgcggtgtaggtgatctggccaccttcattaacggcacttggcgcagtcagcgtaaccgtggtggtgttatcggtacccggtgtgtccgtaacggtggtgttcaccgctgtagtgccagggaccaggttttcgaaatgctcgccgccggtcacgcctttgatagcggtggtaacggtttgatcgcccttgtacacatcatcaggagcaagaaccgaaacgttaccgctcgattggtttacgccaatggtgatggtctggccgttatccaaagtcacggtcagcgggctggtgatgttagtcaccggtgcgccgtttttatccacaaggctggcggtgtaaacgatattgccgccttcgccgacggtggtggtggcagttagaactacatccaccttgtcgatggtgtcgttgatcgtggtagttgcgccgttgcctgcgacttcaagtttttcgaagttgccgccggaagcgtcggtgatcttgacggtctgggtgctcttatcgatgaacacgtcatcggtaggcgcgggcacggtcacagtgccaaccgtgtcgccagccttgatggtgatcgaagagccgttatccaacttcagcgtgacgtcggtaccggccttattgctcaaggtcgcggtgtaggtgatctggccaccctcattcgcttcggtcggagctgtcagcgtaacggtagtggtgttatcggtgcccggtgtatcagtaacggtggtgttaaccggggtagtacctggaaccagattttcgaagtgctcgccgccggtaacacccttgatagcggtggtgacggtttgatcgcctttatagacatcatcaggagcaagaaccgaaacgctaccgctagtctggtttacgccaatggtgatggtctggccgttatccaaagtcacggtcaacgggttggtgatgttggtcaccggtgcgccgttcttatccacaaggctggcggtgtagacgatgttgccgccttcgccaacggtggtagtggcggtcaggaccacatcaactttgtcgatagtgtcgttgatggtggtggtcgcaccgttgcctgcaacttccagtttttcgaagttgccgcccgtggtctcggtgatcttgacggtctgggtgctcttgtcgatgaacacgtcatcggtaggtgcagggacggtcacggtgccgacggtgtcgccagctttgatagtgatcgaagagccgttatccaacttcaaagtgacgtcagtgcccgctttgttggaaagcgttgcggtgtacgtaatttgaccaccttcgttcactgcacttggagcagtcagcgtcaccgtcgtggtgttgtcagtgccgggagtatcggtgacggtggtgttcaccgccgaggtacccggtaccaggttttcaaaatgctcgccgccagtcacacccttgatcgcagtggtgacagtttgatcgcctttgtagacgtcgtttggcgcgatagtggtgatggagccgctagactggttcacaccgatggtgatggtttcgccattgtctagagtgacagttagtgggttagtaatgttggttactggcgcgccgtttttatccacaaggctggcggtgtaaacgatattgccgccttcgcccacggtagtcgtggcggtcagaaccacgtcgactttatcgatggtgtcgttgatggtggtggttgcgccattgcctgcaacttctaacttctcgaagttgccgcccgtggtctcggtgatcttgacggtttgggtgctcttgtcgatgaacacgtcatcggtaggtgcaggcacggtcacggtgccgacggtgtcgccagctttgatggtgatcgaagaaccgttatccagcttcagggtgacgtcagtaccggccttgttgctcaaggtcgcggtgtaggtgatctggccaccttcgttcactgcgctaggcgcggttagcgtgaccgtcgtggtgttgtcagtaccaggggtatcggtaacggtggtgttcaccgccgtggtacccggtaccagattttcaaagtgttcgccgccggtcacgcctttgatagcggtggtgacagtttggtcgcccttgtacacatcatccggtgccaagaccgaaacagtgccgctggactggttcacaccaatggtgatggtttggccgttatccagggtgacggtcaacgggttggtgatgttggtcaccggtgcgccgtttttatccacaaggctggcggtgtaaacgatattgccgccttcacccacggtagtcgtggcggtcaggaccacatcgactttgtcgatggtgtcgttgatcgtggtcgttgcgccgttgcctgcaacttccagtttttcgaagttgccgccagtggtttcggtgatctggacggtctgcgtgctcttatcgatgaacacatcatcggtaggtgcaggcacggtcacggtgccgacggtctcgccagctttgatggtgatgtttgacccgttgtcgagtttcagcgtgacgtcggtaccggccttattgctcaaggtcgcggtgtaggtgatctggccaccttcgttaacggcacttggcgcggtcagcgtaacggtggtggtgttatcggtacccggtgtgtccgtaacggtggtgtcaagatcaagagcggctcgcttcgcatcgtggttaccgtctgctgctacagcccagaaagttgtgtagacacctatgctgcgatagcggtggttcagttaaaaattcattggctgacactccgcattcgcgggcaagcccgctcccacaggggtctgtgaaataaataaaaaataattgccagcagaggtgaggtaaatcgccggcccatccgtgtagtgcatgaaactgcgatcaattcgcattaacagcgttttctacacgggtgctcacagcatgaaatcgacggcgggcggttgggtcaaacagtggctgggagcctcggtattcacggtgtcggggctggtcttattgcccctggccatggcgcaggcgcaggagcagcaaagtgcccagttcaattttgccctggcggccaagccgttgccccaggcgttgagcgatttcagccgggttaccgggatcagtgtgatctacaccgatgaagcgccctacggcatcaacgccccggcggtcagcgggcagatgagcgcgacccaggccctgcaacgtctgctgggccgttccggcttcacctttcgccagatcgacgcccgtaccctggcgctggaaccggtgcccaccgatggcgcggtcaacctgggcgctaccactatcagcggcatcgaccccacccaagccagcaccagctaccagccaccgcccaccagttcggtgatgcgctcccatggcctgctgctggaaaccccgcaaaccgtaaatgtggtgcccgcccaagtattgcgcgatcaacagccgcgtaacctggatgacgccctgggcaatatcagtggtattacccagtccaacaccctcggcagcacccaggacgcggtgatgctgcgtggctttggcgacaaccgtaatggctcgatcatgaaggacggcatgcccgtggtgcagggccgggcgttgaacgccaccgctgatcgcgtcgaagtgctcaaggggccgtcgtcgctgttgtacggcatccaggacccgggtggcgtggtcaatatcgtcagcaaaaagcccgaactggtgcagtccacggccctgaccgcgcgcggttcaaccttcggcagcggcaagaacggcagcggcggcaacctcgacaccaccggccccctcggtgacagcggcctggcctatcgcctgatcgttgaccatgaagacgaagactactggcgcaactacggtacccaccgcgagacgctggtggcgccgtccctggcctggtacggcgataccacccaggtggttgtcgcctatgaacaccgcgagtttctctctccctttgaccgtggcactgccatcgaccccaagacccgccacccgctgaatatccccgcgacccgccgcctggatgagccgttcaacaatatggaagggcgctccgacctgtatcgcctgaccgtcgaccacgacctgaatgacgactggaaagcccacttcggctacagctggaaccgcgaaacctacgacgccagccaggtgcgggtggtcaaggtcaaccccaacggcaccctgacccgcagcatggatggcacccagggcgcgctgaccaccgaccgtttcgcaaccgcgagcctggaaggcaaagtcgcggtggccggtatgcaacacgacctggtgttcggcctggacgacgagtaccgcaagatctaccgcgccgacctgatccgccaggctccgcgcggtgtcttcaattacaacaacccggtgtacggcaacgaagtggcgggctccaacgtcagcgcgccggacagcaaccagacggacctgctgcgcagcgactcgctgttcttccaggatgcgattcatctcaacgaccagtggattctggtcggtggggcgcgctatcaaatgtacgatcaatacgccggcaaaggcgtgccgttcaccgccaacaccgatggcaatggccaaaaatgggtgcctcgggccgggctggtgtaccgctacaccgatgaactgtcgttctacggcagctacaccgagtcgttcaagcccaactccaccattgcgccactggccaacaaaaccgtgctggatggcagcctcgaccctgaagaatccaaggcctgggagctgggcaccaagttcgacctgccggggcgtatcaccgccagtgcggcgttgttcaacatcgacaaacgcaacgtgctggtccaggtgggcgaggggctaacctcggtctacagcgtggcgggcaaggtgcgctcccgtggcctggagctggatgccagcggccagttgaccgacaagtggagcctgatcggcagctatgcctacaccgatgccgaggtcaccgacgacccgacgctcaaaggcaagcgcctgcagaacgtggcgaaaaacaccggctcgctgtcggctgtgtatgacttcggcactcttctggggggcgatcaactgcgggtcggcgccggtgcgcgctatgtgggcgagcgcgctggggatgcggccaacagctttgaactgccgagctataccgtggcggatgtatttgccagctacgacacgcaacttgatgggcagaaggtcaagtttcagctcaatgtgaagaacctgttcgaccgcacctattacacctcttcggtgaatacgcagttcgtgtctattggtgatgcgcggcaggtgtcggtttcaagcacgttgaccttctgattccgggttgctggcattcttctgtgggctggcttgcctgcgatggccataggtttctacacatctttggtgtgacgctggacctgtggcgagggagcttgctcccgtgacggactgacagccgacgctgatctaactgacacaccacgatccaaatgtgggagctggcttggagcacgaccttgccaaggtcggggtcgcgagttcgagtctcgtttcccgctccatatttaacgaaaacgccgatcagtgatgatcggcgtttttgtttgtgcgcaataaataccgccagcgcaccgcccccccttcaaagcgtcgatgtaatctcctgccgtggcataaaaaaccgcgcaaacagctccgactgagatttgatattcagcttgctgtagatattgcggcggtgaaccttgatggtttccgtcgacagcgacagcttgccggcgatctctttgttggagaacccactgagcagtaacttgagcacgtctttttcacgcgtcgttacgtgtgtttccaactgagtaagtgcctcggcccatggggtcggctcggtgaggttttttgccgggtcagtttcaaagcccatgcgttgatgcatcattgctgttacccacggcttgatcatgtccaataccgttatctgcgcctgggtgaagcgcaggttgctgccaaatgacatgcacaacgttctgtcggcatcgagccgtacgttgtattgcgcctcatcgaccgagatgtactgcgcaaaatattgttggtagtactcggtttcccggaagtgttccggcgcaatatcgagcagatggaagaacccgctctgcgggttttctcgatcagcgatatagaacgggtccagcagatacaggcctttcacatagcgatgaataaaggcgtcgatttcttcgctgtcggccacctcgggcaggctgatcacacgcactgcgtggtcaccgaaaaccagcaccacccaattgtctatctgcacatattcattcagtacccgaatcagcgaactccagaactccgggcgattgagctgcatgatcagttttccaaccgatcggtgccaagccaggctatgaaggtcaagcgacatgttctacccctttagggttagggctttgcaggccagagctaagtacttgtaggtatttactattcgtcgaggctcggtatattcaccccgagcttacgatagccatgaaggcgcgtcgtgtggacagggatagtcatatgagtcgagcacacttgcgagctatttttttagcgtcgtttatgggcgctgcaatcagcacgcccgcagccgccgctgaaaattcggtgtatctgtataactggttcggctttcttgagccgcagacgcccaagcaattccagcaggagagcggcatcaagctgcatatggatgctttcgacagcgccgaaaccatgcagagcaaggtcatggctgggcgcaccggttatgacctggtggtggccacctccaatgtattgcccggcttgatcaaggccggggtgctgcagccgttggatcgtgcgcagttgagtaatctgtcgcacatcgaccctgacatcctgtccctgctggcggtcaatgaccccggtaaccgctacgccgtgccctatgtctggggtaccaccggcattggctacgacgtggataaggtcaaggcggcactgggtgatgacgctccggtggacagctgggacctgatcttcaaagaagaaaacatcagcaagctcaagtcctgtggcgtggccatgctcgactcccccagcgagatcatttccattgccttgcactatctagggctgcccagtaacagcactgacccagaggattaccagaaggcccaggcgctgttgttgaaaatccgtccctatgtactctatttcgactcttccagaatcgacaccgacctggcagacggcaatatctgtgcggtcgtcggctgggccaatggtgcactggcggcgcaggcgattaatgaaaagtccaacagtggccgcaagattgcctacagcctgccgcgggaaggggcgttggtctggtctgaaaactgggtgttgctcaaggacgctcgccaccccaaggccgctctggcgttcatcaactacatgctgcggccacaggtgatagccaagacgtccaactacatgctttatcccaacgccaacaaagatgccactgagtttgtcgagcaaaaattgcgggataacccttggatctatcccgataaaaagaccatggcgacattggttccgcttgagcccttgccgctgaaggccgagcgtattcgcacgcgggtctggaccaaggttaaaagcggtacgtgatggggatggggccggggagggagacagcatgcgccagggcggtgatcagcgctattttgagtcagacgactacaaggcctacaaagagattgaagagcagatcggcctgtgtacgccagagcaggcctgggccatgtactacgtttcgacgggcatggtgcgggaaaacattaccctggcggtgatggagcatattggccggggcaatcgagctttgctgcttgagtttccagacctggtgcgagttgccgggcgtgacgctgagccgggggcgctcgcctccaactggcctttgctgcgcaggcgtcgtcgataactctgctgggtgtacctctcgaggggcgatacgcaacatcgatacgaaactgaacccgtgacggcctgccagccgacgcctatctccctgacaccccgcgatcaaactgtgggagctggcttgcctgcgatgacggcctgccagccgacgcctatctccctgacaccccgcgatcaaactgtgggagcgggcttgctcgcgaaggcggcctgacaggcgacgcagttataccgggtacatatccattgctgcggtaacggccacttagggttccgccctgacggcggctcacttttgaaaagcgcaaaagtaagcaaaacgctcttgccccaccactcggcacctcgcttaggctcggtgtaggagcgagcttgctcgcgaaaaactcacaggcgccgcgttcattcaggaagcacgctttatcgcagtgaaaaggagacggattcatttctagaaaataaatctgtccccatttcgtccgagaagcttgccgcgccgtttcagtgcttgcgtccccctcttgtcatgcgctgcagtacctgagcatcgccctgccaatagtgcacgatgactgccgcgacatgccccaggataagcaccagcattgtccaacccagcaaactatgaaagttgctgcccaggtcaaccatccactggattttttccccctcgaacccgtccatgaccggtacgccaaacgcagaaaaagcccggccggatccgtactggcgaatcatcccgataagcgggatcaggaacatcagtgcgtacaacatcccatgcccggtggcggcgatacggcttatgctcggtgggcggcggtgtcgactcagcagactccagccggcacgtaggaccagcagtatcagcagtaacagccccacgggtttgtgaaagggccacaaccatttatccagcgtagagtccgacgccaggtagtgggttatggctgagcaatagatccacgcaaataacaagaacatcagccaatgcgttgcgcgacttaccgagtcgtagtgttcatttggctgaagaggggaggcgcaagtcgtcattgttctgtccttctggcgagtcgcatcgcgttcttttttaagcgcattgaggcgctgtttgatgaaaagtggccagaatgagtctggcggcgacccgatcatatacaacgagacaccggcagcggcggtgtcgaaacataaagaaaagatgcatcctgcaaatgatgatctggaggcccaagtgcatgggagtagtctgttcaaatccaccgatcattttcggccgtacgctccccaccttcgtgcccggtgttcaatacgccccgtggctcaatcatcatcagcttggcttcgccctcggcggcggtcctgtgctcgatgccacgcggcaccacatacaattcacccggtttcacatacaccgggccatccggcaggtcgatacgcaacgtgccctcaagcaccagaaaggcctcatcggtttccgggtgcgagtgccagatgaactcaccctcgatgcgcaccaccttgaattggtagtcgttcatttcggcgaccactcttgggctccattgttgatcgatgagcgaggctttttgcgcgaggtttatcggttgggcgggttgctgtaggtgagtcatgctgagccttcctgtcggtgagaaggccagactatccgggccgacaggtcagaggcttgtatgatcctgcaacctctccaggcgtacacccccgcattcccctcgggaatgcagcacataaaattaatgcatttttcttactgcgacggttaacgtaatttgcgtcaaggccacggagaaccgccttgaactcatcctcacccaatcctgctgacaaattcgatacctcaagagccaacgagtacgcacgacaaagccgtatcgcgttggcgggctatgacgcgtgccaggacctggcagcctgcatgctcgcggcaagccttggtgatgccccttcggccaaggtacttgtggtcggcgccggcggtacggcgcaggagatcatcgccatggccaaccttgaaccgggctggcgcttcatggcggttgatccctctcagccgatgctcgacgcggcaaggcagcagttggaagccaaccacttgcttgataaaaccaccctgcatctcgggacgcttgaagacctggcaccagacgcgtcatacgacgccgccaccttgatcggtgtgctccaccatctggagggtgatgacgccaaggcccgaatgctgcgatcgattcgggcgcacctgaaaccgggggcaccgctgatcgtcgcgggcaatcactacgcgtatgccagccagccgttgctgctggcggcatggggccaacgctggcgtcagcatggcgccaccccggacgaagtgaaggccaagctcggcaaaatccttcaaggcgccgacccgccacattccgaggccgcagtgcagaagctgttgcacgacgctggcttcggcgacgcgacgcgtttcttcagcagccttttctggggggcttggttgacgtgcaaagtggggtagcgatgtttccccttgctcaacaaccgcgattcagatcgcccggagagtagccagccgccgacgccaatcgccgccatgccgaaggtggcattcctcttcggagtcgaaactgacgcagcgggcgatgttcgggacgtgcacgtcagcgtcatccagcgcggcggtagtcagctcgcgcatacgggcgtccgcgccggtcgcgagggcgtgagccttgctcgcgacgctgtcgaacacccaggtcacccgcaggctttgggggaaggcgcggtaatcgacggtgtgggtcagccattcgaagcccgggatttcagctttcgcgatttcgcaggcgtcggtcagggctgcgatgagacggcgttcgatacgggcgtggtcgcgtgaggcaggtggcataaaggaagtctgtgagtcctgggagtgggttggggcgctgatcagagcatagctatctacacaacttcggcacgacgctaaatctgtggcaaggcagcttgctcccgtgacggcctgacagccggcgcatatccatctgacgctccgaaatccaaatgtgggagctggcttgtcgggtcgccgcatcgctgcgaagacggcctgaagagacagcccgagatctacgccgtggtactgcgcggcgccggtgaaaaagccttttgcgctggcggcgacatccgttcgctgtacgacagcttcaagcaaggcgacaccctgcaccaggatttcttcgtcgaggaatatgccctcgacctggccattcaccactgccgtaaacccgtactggcattgatggacggcttcgtcctcggcggtggcatgggcctggtgcaaggcgcggacctgcgggtggtcaccgaacgcagccgcctggccatgccggaagtggccatcgggtacttcccggatgtaggtggcagctattttctctcgcgtattgctggcgagctgggcacctaccttggggtgaccggggtgcagattcgcgcggcggatgccttgtattgcgggctggcagactggtacatcgacagcgccaagctggttgagctggaccagaaactcgacggcctgcaatggcacgactcgccgctcaaggacttgcaaggcgcactcgccaagctcgccgtgcagcaattgcccgacgccccgttggcggccttgcgcccggccattgaccactttttcgggttgccggacgtgcccagcatcgtcgagcaactgcaacaagtgaccgtggccgatagccatgactgggcgctgaccaccgccaacctcatgcagacccgctcgcccctggccatggccgtgaccctggagatgctgcgccgcggccgccacttgccactggaacagtgctttgccctcgaactgcacctggaccgccagtggttcgaacgcggcgacctgatcgaaggggttcgcgccctgatcatcgacaaggacaagactccgaagtggaacccacccaccctccatgcgctggatgccagccatgtcgagagcttcttccgcgacttcgtgcagattgggaaataagccatgcaagatcttgaatacactgaagaacaagtgatgatccgagacatggcgcgggattttgcccgtggcgaaatcgccccccatgcccaagcctgggagaaagccggctggatcgacgacgccctggtggcgaagatgggtgagctgggcctgctgggcatggtggtaccggaagaatggggcggcacctatgtcgattacgtcgcctatgccctggccgtggaggaaatctccgccggtgacgctgctacgggcgcgctgatgagtatccataattcagtgggttgcgggccgatcctcaactacggcacaaccgaacagaaaaacacctggctggccgaactcgccagtggccaagccatcggttgcttctgcctgacagaaccccaggccggttccgaagcccataacctgcgcacccgtgccgagttgcgtgacgggcaatgggtcatcaatggcgccaagcagttcgtcagcaacggcaagcgcgccaagctggccatcgtgttcgccgtgaccgacccggaactgggcaagaaaggcatttcggcgttcctggtgcccaccgataccccaggtttcgtggtcgaccgcaccgagcacaagatgggtattcgtgcgtcagacacctgcgccgtcacgatcaaccaatgcaaggttcccgaagccaacctgctgggtgagcgcggcaagggcctggccatcgccctctccaacctcgaaggcggacgcatcggcatcgccgcccaggccctgggcattgcccgcgccgcgtttgaagccgcgctggcctacgcccgtgatcgggtgcagttcgacaaggcgatcatcgaacaccagagcgtggccaacctgctggccgacatgcaaacccagctcaacgctgcgcgcctgctgatcctccatgctgcgcgcctgcgcactgccggcaaaccgtgcctgtccgaagcctcccaggccaagctgttcgcctcggaaatggccgaacgggtctgctccaaggcaatgcagatccatggtggctatgggtacctggaggattacccggtggagcgttactaccgggatgcacggatcacgcagatttacgaaggcaccagcgagattcagcggatggtgattgccagggagttgaaaaactaccagctctaacggacaccacacaaaaccctgtgggagctggcttgcctgcgatgcagacacctcagtacatcagactaccgatcaacggtaaccacgatgcgaagcgagccgctcttgatcttgctcttgatctgcttttaagcctggtttgcccgataggcgcgataggcaccgtcgatgatccgcgcgacggcaggggttagagggacaggcatcagtcgacactcatctctgcaccagccctaaccagcgccagacaactttttcaccgtccacgtgcggcatcagggcggcgtaatcgaatagccgttcggtaccgggtttgtagtcacacacccatttccctggatacgggcaggtttcgccgctacgggcgcgcatgccgctgacagtccataaccagcgcaccttttggccttgatgtaacggcagccgttcgttcagccggacggtgcactccacgcagcgatccgcctccatttcccagcggccggcgcggggagcggcttcgtggctgctggcgtgccgggcgggttccgggggcgtttggtcggagtcgcgttgccaaagcgtcagcctttcactgggttgcgaggtgagcacgggcaggatttcgccttgcttgaattcgcgacgtgaatcagcgacccccgggacaagccaccagccggcttgggtgcatggcatgcccgcaatgatgctcagcggcgcagagttttgcgcgggagccgttggcttgggtgtgcccaatcgcgatgctggcgtgggccagtcgctgtcggtatcgaaacgtgccatccagcggcggctgtcggcgtcggtaaagcgctcattcggatcaccgtcccattggccgaagccgagtaatcccagatcgtcgtaacggatgggcttgagcagtctgttcaagagcatgggcagttccggcacgccgagttcgacagggtacaacttgggctgttcgcccagctcaatccactggccgctgtgcagttcgatgacgttgatgcgggggtgagcgagtgcgctacgtacctgttcgcgggtcaggtcgagcttttctcgccagtgatcggcgagcaggaaggcccaagtgggcgggcggatgccgttaggcaattcgtcgtccatgccataggcatattcgatatcaagtccgtagaaagctggcataagcgctcgctcccaggtagtgacttccgcccgggtgccatattccattggattggccatggcgaagccgctgtagacctggtgagccttgagcaggtcaatggtcttgaggacgaactgtcgccaggcatcgcgattgtcctgccaccattgccagcggtaatagaaaacaacccaggagtaagccgattttttcccggtaccttcgtgcctgctacgccagaaatggcccgatgttgtgggtgaactggcatggtttgcttcgtcggtaaaccagaattcgaagtaatcgtttgcatcgacatccatcgcttgcatgcgaaggtcgaactcctcctcggggtaagggtgcggacgatctgtgtcttcgtgcatggtcatggtgtaaggatgaccaagcaggcgttcgaaggcttcgtgaatatcaaccatcagcagggcgatatcgacttggttgtcggagttgggggggaagtagaagctgatgaagggggcttacgctatgccgggcgacctcatctgtaccccaatcggtgttgggccattccttaagctctgcaataaactcatcacgctcttcttcgttaaacagtctatgaatagtgctcacgcttacctcctatttttattacctttcatcgaggaattcttctcttctgctttaaaacccacgcagtcttccggaaccctaagcaacgccactttttccttgccaattttcgccggatttattcccgtctcaggtgtcatgagggtcacgtaccttttcatttgttttgaaactgcccaatcacccgggaacttgatctccaccgccgcaaacacattctcggtttcaaacggctcttgccggtgggtgttcggacgccacatacatcgacatcacggcccccatggacaaaccgccgacaaacacctgcccatggcgttgcttgacctgtacgaaggtcttgcgcacgccttcgtaccagtcctgccagccagtggcctgcaagtcgctgttgtcgccgcagtgcccggccagcgtgggcacatacaccgtgcagttacccgccttggccaggcccttggcgacctggcgcaactcggtcggtgtgccggtcaggccgtggatcaacaggatcccgaccggaccatcaccgagaacgaaaccggcagtgccttcaccgaggtcgatcccttgagcattcaccgcgtggtcgctcgcaccagcagttgctccagcaacttcaggcccaggtcgatttccgggtagctgatctcaagggacggtgccagggtgatcacgttcttgtagtaaccgcccacatcgaggatcaacccgagcttctggccgtctaccagcatgtcgcctttcatgccttcttcgaccatgtagtccagggtcgccttgtccggggtgaagccatccgggccgcagatctcgcagcgcagtgccaggcccaggccgtccacatcgccgatgatcgggaagcgtttttgcaagtcttgcaggccttccaggaagtatttgcccttggccatgaccatggcgccgtagtcgacttcgctggtcatcttgaacatttccaggcccaccgcggtacccaacgggttggaggcgaaggtggagtgagtcgaacctggcgggaacaccttcgggttgatcaactcttcacgggcccagataccgcccaatgggttgaggccattggtcagcgccttgccgaacacgatcacgtccggttgtacgtcgaagtgctcgattgaccagagtttgccggtgcgatagaagcccatctggatttcgtcggacaccatcaagatgccgtgctggtccaggacgtgcttgagctcgcggtagaaattcatcggcgggatcacgtagcctccggtgccctggatcggctcgacatagaaagctgcgtattcgcactggttggttttagggtcccagacaccgttgtattcggtctcgaacaagcgggcgaactgctgcacgcaatggctgccgtactcttccttggtcatgcccttcgggccacggaagtggtaagggaatgggataaaattggcgcgttcgccaaagtggccgtagcgacgacgatagcggaagctggaggtgatcgacgaggcgccgagggtgcgcccgtggtagccgccttcgaaggcgaacatcaggcttttaccgttgctggcgttgcgcaccaccttcagggaatcttcgatggactgcgaaccgccgacgttgaagtgcacacggccgtcgaggccgaacttgttcttggcatcgaccgcgatcatttccgacagctcgatcttgcctttgtgcaggtactggctggcgatttgcggcagggtgtcgatctgctttttcagcgcgttgttcaggcgcgggttggcatagccgaagttgacggccgagtaccacatttgcaggtcgaggtaggcctggtcttcggtgtcccacacataagagccttcgcagcgactgaaaatacgcggcggctcgatgtagtgaacggtgtcgccgtaggagcaatacttggcttctttatccagaagcacctgatcttcggcggtagcgatacggatatcagacatgatggaagagttcctgatggtcagaagaggtgttgaaggtggtggcagtacagagagttcaaagaatctaaagctatcgagctcgctgcaaagctgacagaccgtaccgttgaaaccatgagggaatttcatgcggaggctaaagctgactctgataaccttttgcatggagatgagtatgttgtagcgactgagtttttgatggatgctgtgcttggggaggtaaagtctttagccgtgaagggcggcagcaagatttttgctaatgattcgaaagggaaagaagcggtagagactaatcatgctctcaatgctgcgaaaggcgttgttgcttcgagagtcaatgtgcggacgggcactgcgagctctacaggaagtgggcttgaatacgcttggaaaaagcacggtggcgcttggggtgaaaataaatctgcgttcacgatttcaaaggacgaattgaagatcgttctgcaaacgccccaggtcgtcaagacacctgcgtaccaatcaccgacgtctggtaattttattcgaacggttgatatgggaagacctattggtgttgatgccaaaacaggtggacagtccactagttttatgacggtaattactgattcacaaggcaacttggtgaacacatttcctgggaagacgttctgaattatgtattacttaatgatgtgggatacaggtttagcagccgtcggccgagatggctgtcttgatcgtatcgagattcctttggatgtcgcgagttttttctttcggctggatgtcgagcaatttccaatgctttccagcttgagttttgacgattatgacctatttttcggggcgcagattagtgcgcttgctgatgaattggttgctgtggcgaacatcaatcctacgatttcagaattggttaaaaagatgctaggtttattatttaaggcgcaaagcttaagtaaagctgttttgtttgacccgtttaagtgagggtgtataaaaaagtgtgataaaaggggagcggcgaaaaaaaggcgataaagggggcggatttgaatggcgcttacttaaccttcttcggatgtccatttctcctgacctcggcccttgccgctgaacacgtttgcatcagcatcgggtaaggcttgggccttcgttttatggcgcgaggctcaatccgtcccggcaggtttccgacgcgtttcctcgcgatcaacctgagtaaattcggtaccccaccgctttgttcatcggcaccgtactgccgcatcgcaaggcataactgaaggctatgcttggagaaaaggggacagatttatttttgaagtttgggttttgtgaaggtcttgaacagtagcggatgagtctctgtaaaataaatctgtcccctttttcgttgagactctggatgcgctccctgcggacgttataagcgcattgaatgatttttcggaaaaggcggcaatttacgatatcgcggtgtaagtgatctgaccaccttcgttaacggcacttggcgctgtcagcgtcacagtggtggtgttgtcggtaccgggggtatcggtgacagtggtgttcactgccgtagtgccaggcaccaggttctcgaaatgctcgccgccggtcacaccctttatagcggtggtgacagtttggtcgcccttgtacacatcatcaggagcaagaaccgaaacgctaccgctcgattggtttacgccgatggtgatggttttaccgttatccaatgtcacggtcagcgggttggtgatgttggtcaccggcgcgccgttcttatccacaaggctggcggtgtagacgatgttgccgccttcgccgacggtagtggtagcagttagaactacatccaccttgtcgatggtgtcgttgatcgtggtcgttgcgccgttacctgcgacttcgagtttttcgaagttgccgccggaagcgtcagtaatcttgacggtctgggtacttttatcgatgaacacgtcatcgcttggagcgggcacagtcacagtgccaacagtgtcgccagccttgatggtgatcgaagaaccgttgtcgagtttcagcgttacgtcagtgcccgctttgttggaaagcgtggcggtgtacgtgatctgcccaccttcgtttgcctcggccggagcggtcagcgtcaccgtagtggtgttgtcagtgcctggtgtatccgtaacggtggtattaaccggggtagtacctggaaccagattttcaaagtgctcgccgccggtcacgcctttgatggcggtagtgacggtctggtcgcctttgtagacatcgtctggcgcgatggtggtgatagaaccgctcgactggtttacgccaatagtgatggtctggccgttatccaatgtcacggtcagcggattggtgatgttggtcaccggtgcgccgttcttatccacaaggctggcggtgtagacgatattgccgccttcgccgacggtggtagtggcggtcaggaccacatcgactttgtcgatggtgtcgttgatcgtggtggttgcgccgtttcctgccacttcgagtttttcgaagttgccgccagtggtttcggtgatcttgacggtttgggtgctcttatcgataaacacgtcatcggtaggcgcaggcacagtcacggtgccgacggtttcgccagctttgatagtgatcgaagagccgttatccagcttcaaggtgacgtcagtaccggccttgttgcctgcgtaccctgcagaatcatctgggtcgcttcttccttcatctcggcatcccacaagtgcgggttttcgattttgatctggttgatcacgtcgataccgaagttcaggtgcatcgactcatcgcgcaggatgtactggaactgctcggccacgccggtcattttgttgcggcggcccatggacaggatctgggtgaagccgcagtagaagaagatgccttccagcacgcagtagtaggcgaccaggttgcgcagcagttctttgtcggtgtcgacggtgccggtttcgaactttggatcggagatcgagcgggtgtatttcaggccccaggcggcctttttggccaccgatggaatctcgtggtacatgttgaagatctcgccttcatccatggccagcgattcgatgcagtactggtaggcgtgggtgtggatcgcttcttcgaaggcctggcgcaggatgtactggcggcactccgggttggtgatcaggcggtacacggccagtaccaggttgttggccaccagggagtcggcggtggagaagaagcccaggttgcgcatgacgatgcggcgttcgtcgtcggtcaggccttcggggtttttccacagcgcgatgtcggcggtcatgttgacctcttgcggcatccagtggttggcgcagccgtcgaggtacttctgccaggcccagtcgtacttgaagggcacaagttggttgaggtcggcgcggcagttgatcatgcgcttttcgtcaacggcgacgcgggcggaggcgccttccagctcggcgaggccttcggcgacgtcgagtttgtccagggcggccttggcgcgcacgatggcggcagagtcgttggcggtgacggcgcgggcttccacggcggcagcggcgccggcaccgtcgaggcggtccatgttggcttcggtggcgtggccggcgttggcgcctttccgctggtggcgcatatcatcgctaccggcgagcgctatgaaacctcaccggccgattgcgaactgcacttcatgtccttcgccttcgacggttcccacgaaggctggatgcacccgctgatcaacggcgccagcgtgttgatccgtgacgacagcctgtggctgccggaatacacctacgagcagatgcaccgccacaacgtgaccatggcggtgttcccaccggtgtacttgcaacagttggccgaacatgccgagcgcgacggcaacccgccggcggtgcgggtgtattgcttcggcggtgatgccgttgctcaagccagctatgacctggcctggcgcgcgctgaaacccaagtacctgttcaacggctatggcccgacggaaaccgtggttacaccgttgttgtggaaggcccgcaaaggcgatccctgcggcgctgtctatgcgcccatcggcaccttgctgggcaaccgcagtggctacgtgctggatgcgcaactgaatctgcaacccatcggcgtggccggcgagttgtacctgggcggcgagggcgtggcccggggttacctggagcgtccggcactgactgccgagcgtttcgtaccggacccgttcggcaaaccgggcagccgcgtgtatcgcagcggcgacctgacccgtgggcgtccggatggcgtggtggattacctggggcgtgtcgaccatcaagtgaagatccgcggttttcgtatcgaactgggggaaatcgaagcgcgaacttgatctccaccgccgcaaacacattctcggtttcaaacggctcttgccggtactcaaccaccaccagatcaggcgccagcaaacccttcggccgtggccaaaaaggctgcacggcactgccgaaccgtctgggccgcgtaaccggctcgcccaacaacgccttcttgctgttgccgttgtagttgggttcggccttgagcgggctgcgccactccagtgcctcgtccacggcttcaaaaaacaacgaggcggtaaattgtttgagggcgatctcgatggtggtcggtaccgtatcgccggcaattttcttgcggatacggcgcggtaccttgatcggcatctgcagcgcaacggtgcagacttggctgatcgccgggcgaaagggcactttgcgttcgatgtattccttgaacgtgatgttctcctggcctcgtcgagaaaccgtgctattaccgccgcgatccaccacggcaaaggtggaactcttgacctcgatctcgcgggtcattgcttcaatggtgacgcgaagggtttccttgatctgcttcctgcgctcggcaatttccaccgcgagttgggccagttcggcggcggttctgctgttctcaaaagcctggtttgcccgataggcgcgataggcaccgtcgatgatccgcgcgacggctgagcaatgagtgaggatctttgggccgcccgcgaaggcgacgcactgctgcacacctcggtgatggccgatattctcggcggtgtactggaagtggccgcctatgcggcgctcaccaccgtgggctgcctggccgttgccggggcggtgttcctcgcgactggtgcaaccatcgccaccggcggtgtggccctggtgttggtggtgggcgcggtcgtcggtattaccgctggcctcacgggggcggacttgaagatatccagttggtgcgagtccgccgccaactgggtgttcccgccggtgatcgatgcattcatcaccagcggctcgtacaacgtgtttatcaatggcaaaaaagctgcccgtgcagccggcaagatgaccgccgtgccggtcgcgcccagcgagccgccggcacccagcttcctggacatggccggggagtttttctcgcagatgtggcgcccgaccgtcgcctcgcccgcccccggcaccgagccgtgcccgctggacaccgtggcatgcaacaagcatccgcccatgcccctgcagtttattgccgaaggttccagctcggtgttcatcaacgggcagcctgccgcgcgcagcggggatcgcagtacctgtcgatatggcttacacgcccaggatgctctgcggtgtagctcaggtcgacgtgcatcaagtcatgggtgtcgcgtaggcggcacagccgtccttgggcatcgtaatcaaggaagatccgaccttcattgcgatcacccaacaagtgcaagcgcatccgtgaactgttcagcggatcgggctcgaacagccgataaaggccgtcgatgctctcgatcaataccgcgccgtcgccgttgcgtctcaccgcgaggccttcgccgggatcgaacgcgccaccggacaacgggatataaccgatctccaggcgccgtccctgctcatcgatatagaaaaggttttcatcggcatctatttcgacggacacctcatagtcgacgctccagcctgcgccgaagaggccatcgcgacgtgtatcgagactgttgtagaaacgttgccaatcgatagggagcagaccgggcaggacaaagtccagctcctcctcttcgcccaagaccttggcccccgtcgcactgtgcaccggattgggtgagccatgcatggcgctcttgagtgccgaggtgaccttggcggtcccgtaagagatcgcgccacccaccaacgccccgccaacttcaccgggtccggtgtcaggtagcgaccaatatccggattgtagtagcgatggcggttgtagtgcagtccgctttctgcatcgaaatactgcccttgaaaccgtagcgggttgtcgatgtcgcccacgtcgagccgggcaatatggccgtaggcgcggtagtgggcggaccagacgattttgccttcggggttggtgagttcctgcggggtgccgaggtggtcgagttggtagtggtagggcgttgtggcttgtgggccgaagccttccagtagcgccagtggtcgaaagctatccggttcgtagaggtaactgcgatgacgctctgcatggtgctcggcaatcagcttgtcgccttgccagaaaaactcggtggtcttgccgtccacggttttgctgatgcgccgcccaaatgggtcgtagcgatagctggcggtttggccgttcggctttgtgatgctgattaaccgatgctggcagtcgtagcggtattcggtgacgagttgctggcccttgccacgccgttcgcggatgaggttgccgaaggcgtcgtagtcgtaatggcggtcgcctcaccaccattaccgattcggtcgacaccaccaccgttaccctgacagccgacggcagcgtgaccgaaggcgggcagatcacttacaccgccaccctgaccaacccggcgcagaccccggtgaatgtcaccttgagcaatggctcggtgatcaccatcaaggcgggtgagtcgaccggcaccgttgtggtcgatactccggccaacgacgtttacaacaacggttcgaccgtcagcaccaccatcactggtgcaaccggcggcaactttgaaaacctggtaccgagcaccacgcctgcgatcaccaccattaccgattcggtcgacaccaccaccgttaccctcacagccaacggcaacgtgaccgaaggcggccagatcacctacaccgccaccctcaccaatccggcacaaaccccggtgaacgtcaccttgagcaatggctcggtgatcaccatcaaggcgggcgagtcgaccggcaccgttgtggtcgatactccggccaacgacgtttacaacaacggttcgaccgtcagcaccacgcccaggcaccgaggtcgctgccgagtgtgccggctaccctgccgacggcgcccgtggtaccggttgaggccataagggcagtggtgccgaagtttttggcgttttccggggcggtgcccgcagctgtagaaccggccggtaccgaaacgcaggatttggcaaaaacgcaggtatcagcggcacgattcgacgcaacgggcgcggcataattcgcagggggcgaggcggatgcagtcggcctcattacaatcggggtgacacgttgaggttggggaccaaactcctgagatttggaactctgattggcaatcaactccggcggcggatcgcatttgcagatgcacagatcaccctccagtgccgcttgtttgccgttccactcttcgtgcaaatgagggccggtaagcgcgatgaagccttcagtgccgcatgccggacaagcgacccggtcaccctccctcgagatcatttcgccgttgaaactggtgccctcacaaccgctggttaccttgccacccaccgtggtggttgaacctgtgtgacttcgacgggaccattacccccaccgatgtcatcgacaacgtcctccaacgcttcgccggccccgagtgggaaaccattgagcagcaatggctggatgggcatatcggttcacgcgaatgcctgagccgccaactggcgctgatcaaggccaccccggctgaactgctggcgtactttgacagtgtcgagatcgacccggacttcccggacttcgtcgatcacgtcatgggcctgggtgcctccatcgaagtggtcagcgacggcatcgagcagggcattgcccgcatcctttcgcgcaactacgtgaccctgctgccgatcctcgccaaccgcctgcgccaggtcgaccaggacagctggcgcatcgacttcccgtatgccagcgatgcctgccgcgccgcttccggcaactgcaagtgcaaatccacgccgcgcaacaagcgcgtgctggtgatcggcgacggcaagtccgacatgtgcgtggcctccaccgccgacttcgtgttcgccaagggggggcgtttgacaggtcgcccccacgcctaatccacaatgaacaacttcgccccgatcgtagtgaatgaccgatgtccctcagcattattgcccacctgatagctcatgccaggcgtcagtgtgaactgacgaccatcttccagttctgtatgcaactgaccctccaggcacaacaagatgtgccccctccaacaccagtgatcggccagatatccagggctgtattcgaccatccgcacacgctctgaaccaaactggcaggtacgccaataagctgtgcctgtctgaccgggatgtgccaccggatctatcgttgaccagtcggtggtaccaaatgggattgcagtgagatccattgttgcctcattgaaatgcaataaattcagaccgtatcattcgagcaatggtgccgatagacacagaaggcccgcatttatgtaatacaggcgcggtgacagaaactgccttcaccctgccactggatagccattcggtgctgctatcgcgggtaaggcgcgcgatgatcgccatcaagcggtcgatttcccgcgccgataaactgctggtgggttcatcaaaggcgatcacgttggcgccgcgggacagcgctttggcgatttccaccaattggcgctggcccagggacaggcgtccgagcttctcgtcagggtcgatttcatcggccaggcccttgaggcaggtcagggcctgcttgcgcagcaggcctcggttgaccacgccaaagcgcgtgggcaaatgcccgagaaagaggttctcggccacgctcatttccggcaccaggtgcagctcttggtgaatcaccgccacaccgctggcgatgctgtcggcggcgcatttgaacgccatggtctgcgcgccgatttgcacggtgccgctggatggaatgtaggcgccgccgaggattttcagcagggtcgacttgcctgcgccgttctcgcccatcagcgcgtgcaccttcatcgcccgcctcgccgccgaggaaggcctgctctacaccttcgaacaccgcgacgacggccacaccctcgtcctcaccgaccgcgtcggcggcctgggcaccatcggcacgcacaaacattgccccgtgatctaccaacccatggccggcggcgatgccacggaaccggccttgacccgttttcactacaccgaacaagtacgcaccgcccgccaggtacaacgcgactacaccttcacccacccgcgctacgaccaacagcacaccgccaccggcgaccaggacctgaaaaaccagcacaaggactacgagcgctacgactaccccggccgctacaaacgcgacatcgccggcaagcccttcaccaagacccggctgaccgccctgcgcaatgacgccaaactggcgcacctggccggtgacgaggtgctcgcctttgcgggtgtcgagcaggcgggtgaggttgccggctttgtcgtagtcgtattggcgttggtagaggtggttttgttgctgggtcaccgcatgggcatgcaggcggtgttgatcgtcgtagtggtaatggctgagcagttggccttgctggcgctgatgttcgcggccgctgttgaagagatgtgaggtgagcacctcaccgttgagttcgacggtggcgaggtggccgcctttatcgtggttgaaggtgacgcggttgttgtctggcaggcacaggtttttcagttgcccacaggcgtcgtagccgtagcgcagggtgccccagccttggtgttcggcggtgaggcggttttggcggtcgtattcgtaggccaacgcccagtatccattgctgcggtaacggctacttagggttccgctctgacagcgggtcactttggaaaagagccggaatgccggcccagcccaaagtaaccaaagggctcttgccccaccactcggcacctcgcttaggctcggtgtgcccgaacgcaggcttgaatccgtgggccgccgccacgcgccatccctggcgcggggcggctaacccggcgtcctgccgggttacccacgaattcaagcctgcgttcggccagcgtggtttaacggggcgcctgagatcaagatcaaaagcagatcaagatcaagagcggctcgcttcgcatcgtggttaccgtcggccggtgaggtttcatagcgctcgccggtagcgatgatatgcgccaccagcgggccgtgtgacaccgccacgcccttgggcaaaccggtggagccggaggtgtagatcacgtaggcgaggttgtcgccgtccagcgccacagtcggggccgtatcggtgtaatccgaccaggcttgcacctgatccaccgccaagacgtcgaggccgtccgggatcggcaaccggtgttgcacggccgaatgggtcaacagcattttcgagcggctgtcttgcatcatgtacagcaggcgatcacgtgggtattcgatatccagcggcgccgtttttatccacaaggctagcggtgtagacgatattgccgccttcgccgacggtggtagtggcggtcaggaccacatcgaccttgtcgatagtgtcgttgatcgtagtggtcgcgccgctgcctgcaacttccagtttttcgaagttaccgcccgaagcgtcggtgatcttgacggtctgagtgctcttatcgatgaacacgtcatcggtaggcgcaggcacggtcacagtaccgacggtctcgccagctttgatagtgatcgacgagccgttatccagcttcaaggtgacgtcagtaccggccttgttgcaggatcgttcccgcgctccgcgtgggcatgcataccgtgacgctctgcgtcaccccggtacgcagagcgtcccacgtggcgttaccacgcagagcgtgggaacgatcaagcgttaagcactgccctgaggatcgttcccgcgctctgcgggggcatgcattccgtgacgctctgcgtcacctggggacgcagagcgtccctagcggcgttaccacgcggagcgtgggaacgatcaagtgttaaacactgcactgaggatcgttcccgcgctccgcgtgggcatgcataccgtgacgctctgcgtcaccgaccttcgggttatgagcccgacgagctaccagactgctccatcccgcgtctgtgggcggcattctacagcccagcggcagggtgtcaaccgttaatgagccgatcgctgaaataagcgctaattattctgaaatcaaggtgttgggcgcattgtgcaggcaaaaacagacgcgcacaaaaaaggccactctttcgagtagccttttttgatgtttggttgcgggagccggatttgaaccgacgaccttcgggttatgagcccgacgagctaccagactgctccatcccgcgtctgtggctcggtgttcatcaacgggcagcctgccgcgcgcagcggggatcgcagtacctgtgacgccaagatcggcaccgcccagggtctgatttcgccggatgtgcgcattggtggcgagaccattgtggtgcaggaaattcgtagcgggaaaacgccgggggtggggctggcgattgccgtggtgatggcgttgcgcggcaacctgaaatgtttctggaccaagctgccgtgcatgatcggaggggcgttggtgggtggcgcgatctcttacgggaccgccaaggtcacctcggcactcagctcggtgttcatcaacgggcagcctgccgcgcgcagcggggatcgcagtacctgcgatgcaaagattgggacggccgagggcttgatttcgccggatgtgcgcattggtggtgagaccattgtggtgcaggagattcgtagcgggaaaacgccaggggtggggctggcgattgccgtggtgatggcgttgcggggcaacttgaaatgtttctggaccaagctgccgtgcatgatcggaggtgcgttggtgggtggcgcgatctcttacgggaccgccaaggtcacctcggcactcacgctcttgatcttgatctgcttttgatcttaggcgccccgttaaaccacgctggccggaattcgacagggatttggggggtaaaccggcagggatgccggtttagccgccccgcgccatggatggcgcgtggcggcggccccccaaatcactggcggattacgggcacaccgagcctaggcgaggtgccgagtggtggggcaagagcgctttgcttactttcgcgcttttcgaaagtgagccgccgtcagggcggaaccctaagtggcctttaccgcaggaatggatatgtactgacgcgccattcctggccgtctggtccaggtacttgagcccattggtagaagcagcgcatgccactcggcaatcggtgctcggtcatgcgcctgccgctgtcgtaggcaaagctgcgaagggtcgtgccctgagcgtccaatacttcggcaagatcgccgttgctgtcatagcgataactgacgagcacgtcgcagcgcccatcgaaatggtcctggcgcaggtaacggcgctcgatatggcttacacgcccaggatgctctgcggtgtagctcaggtcgacgtgcattggataacggtaaaaccatcaccatcggcgtaaaccaatcgagcggtaacgtttcggttcttgctccggatgatgtctataaaggcgatcaaaccgtcaccaacgcaatcaaaggcgtaaccggcggcgagcatttcgagaatctggtccctggcactaccgcggtgaacaccaccgttacggacacaccgggtaccgataacaccaccaccgttacgctgacagcgccaagtgccgttaacgaaggcggccagatcacctacaccgcgatacgacaaagccggcaacctcacccgcctgctcgacacccgcaaaggcgaacacctttaccgctacgacccgctaaaccgcctgacccgcgccgaccactcgcaagacatacaggaacgcttcggccacaacccggccggcaacctgctgatgcaagaccgtcccggtccagacatcgtcgcggcgaatcgtctgatgatccagggcgaccgccattacgactacgacgccttcggcaacctcatccgcgaacggcgtggaactcggccgcgactatcgcttcagcgcgatcgacggcgccctgcatcgggccgacgcgcgcagcgggccggcgcggctgcagccgctggaacgcgaccgcttcctgctgggttcgctgaacttccgcttccagcgcgatgcggccggcgcgatcgacggggtgtcgatggacgtgggccgcgtgcgcgacctgcgttgccagcgccgctgacgctcgcgatcaaagattcatcgcaccggaaaccgcagccgtgcatatccattgctgcggtaacggctacttagggttccgccctgacggcggctcacttttgaaaagagcccaaaagtaagcaaaaggctcttgccccaccactcggcacctcgcttgggctcggtgtgcccgtaatccgccagtgatttggggggccgccgccacgcgccatccatggcgcggggcggctaaaccggcatccctgccggtttaccccccaaatccctgtcgaattccggccagcgtggccgagggcctgtacatcaccgtcgacgcctaccaggtcgacatcgacgaccgcatcatcctctccgagaacctgcgcggcccggcggtggcgagcttcctggaagcgcgcggccaccccggcatcaacggcgggcgttacttcaccaacgcggtggacacgcgcacccgcggcctcgacatcgtcggcagctacagcttcgatcttgctggcggcgcgctcgacctaaccgccggctacaaccgcaacaacggcgggtcactttggaaaagccccaaagtaaccaaagggctcttgccccaccactcggcacctcgcttgggctcggtgtgcccgaacacaggcttgaatccgtgggccgccgccacgcgccatccatggcgcggggcggctaacccggcgtcctgccgggttacccacgaattcaagcctgcgttcggccagcgtggtttaacggggcgcctgagatcaagatcacaagcagatcaagagcgattattataaataaattttctgtttctaagacattagtgattttattgtattcgaaagttaaattactacgattagtaatagtttcaatattgacttcatagaatttgtttatagtgtgaggcagttctccgtgaatatcttctaaactttttcgattttcttgtagcttaaaaacataccctttgaaataaaaaaacaaaaagaaaacagataaaaagagaagaaaagattcttatcatcagtttcttgagggtaagggtattcaagcatccatgtcacgtaagggtaacagcccagacaatggtatgatggagtctttctttgggattctgaaatcagaaatgttttacggttatgagaagtcgttccagtcgcttaagcaattggaacaagctattgtagactatattgattactacaacaataaactaattaaggtaaaactaaaagaactcgttccttgatgcagaagctgataaaaagcatgctgcgcattggagccaatctcgccccacaaaattggacacgtatcataatcaaggcgcgcgccatgctgcgtcaccgatttgccattactttccatctcaagctgggtcaagtagcttggcaaatactccaaacgcccatcataaggcagcacggtatgcgcattgacttgtaaaaaggtactattccaaacgggcgacggcaagtccgacatgtgcgtggcctccaccgccgacttcgtgttcgccaaaggcagcctcgccgagtactgcgtcgcccatcagattcctcatgcgcgcttcgacacctttgcgcaagtgccggcgttgctggccaagttgccacaaggcctcgccgccaatgccaccaccttcaacacctcttctgaccatcaggaactcttccatcatgtctgatgcgacggcaagtccgacatgtgcgtggcctccaccgccgacttcgtgttcgccaagggcagcctcgccgagtactgcgtcgcccaccagatccctcatgcgcgcttcgacacctttgcgcaggtgccggcgttgctggccaagctgccacaaggcctcgctgccaacgccaccaccttcaacacctcttctgaccatcaggaactcttccatcatgtctgatgtgcgctgggagttcggcaccatccagccctcggccaacctgatccaccgctaccagagctacaacgccttcggcgagatcgccagcgagaccgacggcaacggcaacaccaccaacctgagctacaacacgctcggcaagatggtgaggaagctcgatccgctggcggagatcacctacgccaacggctacgtggccacggtgcgcaacctggtgtcctgggcgacctacaacaccgtcaatgccgaagccgcgatcggcggcccgatcgccgacggcctcagcttccgcgtgtcgggcctgctccagcgtcgtgacgactgggtcaagaacgacaatgaaggcggcaacgccgccagcgagctggaaggctatcgcgacatggccggccgtgtgcagctggcctatgaagccggcgacttcacgtgcgcagcacttccttgagaaaatcctgcagcactaaaagcaactcgctcctgccctgtaggagcgagcttgctcgcgaaagacgaaaacgataacgcgtgtatccaggattaacgcgctgcccttgagtttttcgcgagcaagctcgctcctacagttggcaggcgagaagtagctgacccaaggcatctgtgatgaacaggctcggtgtgcccgtaatccgccagtgatttggggggccgccgccacgcgccatccatggcgcggggcggctaaaccggcatccctgccggtttaccccccaaatcactgtcgaattacggccagcgtggtttaacggggcgcttgagatcaaaagcagatcaagatcaagagcggctcgcttcgcatcgtggttaccgtctgtcagctttgcagcgagctcgatagctttagattctttgaactctctgtactgatcccccgctaccgcttcagctgctgcatgtgcgacaacactcactaccagcttcataggccccatcatggcctgcacgctaagcatcgcagcctgaaactgctctgcgggcagcttctgggaaagcttgactatatcaacgatgccattgagcgctgcttcccccccgttacgcggtaagtcatcaatgagcacggccggtagctcgtaccctgagccagtcttcggctgggtgggaggtgtggcacggcaactgccatcatccatgcagcccttgattttcttatcgtaaattgccgccttttccgaaaaatcattcaatgcgcttataacgtccgc

SEQ ID NO: 2 - DNA, 20 bp, Artificial Sequence
  primer
agagtttgatcctggctcag

SEQ ID NO: 3 - DNA, 15 bp, Artificial Sequence
  primer
accttgttacgactt

SEQ ID NO: 4 - DNA, 1010 bp, Artificial Sequence
  DNA fragment of Pseudomonas genome
tgcaagtcgagcggtagagagaagcttgcttctcttgagagcggcggacgggtgagtaatgcctaggaatctgcctggtagtgggggataacgttcggaaacggacgctaataccgcatacgtcctacgggagaaagcaggggaccttcgggccttgcgctatcagatgagcctaggtcggattagctagttggtgaggtaatggctcaccaaggcgacgatccgtaactggtctgagaggatgatcagtcacactggaactgagacacggtccagactcctacgggaggcagcagtggggaatattggacaatgggcgaaagcctgatccagccatgccgcgtgtgtgaagaaggtcttcggattgtaaagcactttaagttgggaggaagggttgtagattaatactctgcaattttgacgttaccgacagaataagcaccggctaactctgtgccagcagccgcggtaatacagagggtgcaagcgttaatcggaattactgggcgtaaagcgcgcgtaggtggtttgttaagttggatgtgaaatccccgggctcaacctgggaactgcattcaaaactgactgactagagtatggtagagggtggtggaatttcctgtgtagcggtgaaatgcgtagatataggaaggaacaccagtggcgaaggcgaccacctggactaatactgacactgaggtgcgaaagcgtggggagcaaacaggattagataccctggtagtccacgccgtaaacgatgtcaactagccgttggaagccttgagcttttagtggcgcagctaacgcattaagttgaccgcctggggagtacggccgcaaggttaaaactcaaatgaattgacgggggcccgcacaagcggtggagcatgtggtttaattcgaagcaacgcgaagaaccttaccaggccttgacatccaatgaactttctagagatagattggtgccttcgggaacattgagacaggtgctgcatggctgtcgtcagctc

SEQ ID NO: 5 - DNA, 522 bp, Artificial Sequence
  sequence rpoD of strain B2021
atgtccggcgccgatagtgctcacagcgattacgtgggctcactgtttcgcattcattacccttggctgtgcagccgcttgcaccgctacctcaactcccgtgcccacgccgaagacatcgccgtcgacgcctttgtccagctcctgagtgcgcctcagctaacgccgatacgacagccccgcgcattgcttaccaccattgcccagcgcctcgtataccaggtgtggcgccggcgtgacctggagcgtgcctacctcgctgcgctggatgacgatgccgcctgcgccgaggatcgggcccaggtactcgaagccctgcaagccatcgatctattactcgaccgcttgccggccaagatcaagacgacgttcctgttgtcccgcgtcaacggcctgacgtacccccagatcgccgccgaactggggatttcccagcgctcggtcagtgactatatggcccgcgctgttaccggccttgaatcccacaccgatcaaatgtgggagctggcttgcctgcgatag

SEQ ID NO: 6 - DNA, 2418 bp, Artificial Sequence
  gene sequence gyrB of B2021
atgagcgaagaaaacacgtacgactcgaccagcattaaagtgctgaaaggtttggatgccgtacgcaaacgtcccggtatgtacattggcgacaccgatgatggtagcggtctgcaccacatggtgttcgaggtggtcgataactccatcgacgaagctctggccggtcactgcgacgacatcagcattattatccacccggatgagtccattaccgtgcgtgacaacggtcgtggcatcccggtagacgtgcacaaagaagaaggcgtttcggcggcagaggtcatcatgaccgtgctccacgccggcggtaagttcgatgacaactcctataaagtatccggtggtttgcacggtgtaggtgtgtcggtagtgaacgccctgtccgaagaactgatcctgactgtccgccgtagcggcaagatttgggagcagacctacgtccacggcgtaccacaggaaccgatgaaaatcgtcggcgacagtgagaccaccggtacccagatccacttcaagccatcggaagaaactttcaagaacatccacttcagctgggacatcctggccaagcggattcgtgaactgtctttccttaactccggtgtcggcatcgtcctcaaggatgagcgcagcggcaaggaagagctgttcaagtacgaaggtggcctgcgtgcgttcgttgaatatctgaacaccaacaagactgcggtcaaccaggtgttccacttcaacatccagcgtgaagacggcatcggcgtggaaatcgcactgcagtggaacgacagcttcaacgagaacctgttgtgcttcaccaacaatattccacaacgcgatggcggtacccacttggtgggtttccgttccgcgctgacgcgtaacctgaacacctacatcgaagcggaaggtttggcgaagaaacataaagtcgccaccaccggtgacgatgcccgtgaaggcctgacggcgatcatctcggtcaaggtaccggatccgaagttcagctcccagaccaaagacaagctggtgtcttccgaagtgaagactgcggttgaacaggaaatgggtaagtacttctccgacttcctgttggaaaacccgaacgaagccaagctggtcgtcggcaagatgatcgatgctgcccgcgcccgtgaagccgcgcgtaaggcccgtgagatgacccgccgtaaaggcgcgctggatatcgccggcctgccaggcaaactcgctgactgccaagagaaggaccctgccctctccgaactgtacctggtggaaggtgactctgctggcggttccgccaagcagggtcgtaaccgtcgcacccaggccatcctgccgttgaaaggtaagatcctcaacgtcgagaaggcccgcttcgacaagatgatttcctcccaggaagtcggcaccttgatcacagcgttgggctgcggtattggccgcgacgagtacaacatcgacaagctgcgctaccacaacatcatcatcatgaccgatgctgacgtcgacggttcgcacatccgtaccctgctgctgaccttcttcttccgtcagttgccggagctgatcgagcgtggctacatctacatcgctcagccgccgttgtacaaagtgaaaaagggcaagcaagagcaatacatcaaagacgacgacgccatggaagagtacatgacgcagtcggctctggaagatgccagcctacacttgaatgacgaagcgccgggtatctccggtgagtcgctggagcgactggtcaacgacttccgcatggtcatgaagacgctcaagcgtttgtcgcgcctgtaccctcaggagctgaccgagcacttcatctacctgccggccgtaagcctggagcagttgggcgaccacgccgccatgcaggattggctggcccaatacgaagtgcgcctgcgtactgtggagaagtctggcctggtgtacaaagctagcctgcgtgaagaccgcgaacgtaacgtatggctgccagaggtcgaactgatctcccatggcctgtcgaactacgtcaccttcaaccgcgacttcttcggcagcaacgactacaagaccgtagtcaccctcggcgcgcaactgagcaccctgctggacgacggtgcttacatccagcgtggcgaacgcaagaagcaggtcaaggagttcaaagaagccttggactggttgatggcggaaagcaccaagcgtcataccatccagcgctataaaggtctgggcgagatgaacccggatcagctgtgggaaactaccatggaccctgctcagcgccgcatgctgcgcgtgaccatcgaagacgccattggcgcagaccagatcttcaacaccctgatgggtgatgcggtcgagcctcgtcgtgacttcatcgagagcaatgctttggcggtgtctaacctggacttctga

SEQ ID NO: 7 - DNA, 2655 bp, Artificial Sequence
  gene sequence gyrA of B2021
atgggcgaactggccaaagaaatcctcccggtcaatatcgaagacgagctgaaacagtcctacctcgactacgcgatgagcgtaattgtcggtcgggcactgcctgatgcgcgcgatggcttgaagcccgtgcaccggcgtgtgctgttcgcgatgagcgagctgggtaacgactggaacaagccgtacaagaaatctgcccgtgttgtcggtgacgtgatcggtaagtatcaccctcacggcgacactgcggtgtacgacaccatcgttcggatggcacagccgttttccctgcgctacctgctggtagacggccagggtaacttcggttcggtggacggcgacaacgccgcggccatgcgatacaccgaagtgcgcatgaccaagctggcgcacgagctgctggccgacctgcacaaagaaaccgtggactgggtgccgaactacgacggcaccgaaatgatcccggcggtcatgccaacccgtattcccaacctgctggtcaacggctccagcggtatcgccgtgggcatggccactaacatcccgccgcacaacctcggtgaagtcatcgacggttgcctggcccttatcgacaaccctgagctgaccgtcgatgagctgatgcagtacatccccggcccggacttcccgaccgcggcgatcatcaacggtcgcgccggcatcatcgaagcctaccgcaccggtcgcgggcgcatttacatgcgtgcccgctcgatgatcgaggacatcgacaaggtcggtggccgccagcagatcgtcatcaccgaactcccgtaccagctgaacaaggcgcgcctgatcgagaagatcgccgagctggttaaagagaagaagctggaaggcatcaccgagctgcgcgacgagtccgacaaagacggtatgcgcgtggtaatcgagctgcgccgtggcgaagtgcctgaggtgatcctcaacaacctctacgcccagacccaactgcaaagcgtgtttggtatcaacgtggttgccctgatcgatggccgcccgcgcatcctgaacctcaaggacctgctggaagccttcgtgcgtcaccgtcgcgaagtggttacccgccgtaccgtgttcgaactgcgcaaggcccgcgagcgcggccatatcctggaaggccaggcggttgcgctgtcgaacatcgacccggtgatcgccctgatcaaggcctcgccaaccccgtcggaagccaaggaagcgctgatcagcacgccttgggaatccagcgccgtggtcgcgatggttgagcgcgctggcgccgattcgtgccgcccggagaccctggacccgcaatacggtctgcgtgaaggcaagtacttcctgtcgccagaacaggcccaggccatcctggagctgcgtctgcaccgcctcaccggccttgagcacgagaagctgctggccgagtaccaggagatcctcaaccagatcggcgagttgatccgcatcctcagcagcgccgtgcgcctgatggaagtgatccgcgaagaactggaagtgatccgcgccgaatacggcgacgtgcgccgcaccgaaatcctcgatgcgcgcctggacctgaccctgggtgacatgatcccggaagaagagcgcgtggtgaccatctcccacggcggctatgccaagacccagccattggctgcgtaccaggcccagcgtcgtggcggtaaaggtaaatcggctaccggcgtgaaggatgaggactacatcgctcacctgctggtcgccaacagccacaccacgctgctgctgttctccagcaaaggcaaggtgtactggctcaagacctacgaaatcccggaggcctcccgcgctgcccgtggtcgtccgttggtcaacctgctgccgctggacagtgatgagtacatcaccaccatgctgccggtcgaggaatacaccgaaggtcacttcatcttcatggccaccgccaaaggcaccgtgaagaagaccccgctggaatccttcagccgtcaacgcagcgtgggcttgatcgccctggagctggatgagggcgacgtactgatttctgccgccattaccgatggcgaacgtgaagtcatgctgttctccgatggcggcaaggtcacccgcttcaaggaatccgacgtgcgtgccatgggccgtaccgcccgcggtgtacgcggcatgcgcctgccagaagggcagaagctgatttcgatgctgatcccggaagaaggcagccagatcctcaccgcttccgagcgtggttatggcaagcgcaccgccatcagtgagttcccggagtacaagcgtggcggccagggcgtgatcgccatggtcagcaacgaccgcaacggccgtctggtcggcgcggtgcaggtgctcgacggcgaggagatcatgctgatttccgaccagggcaccctggtgcgtacccgtgtggcggaagtgtcgagcctgggccgtaacacccagggcgtgaccctgatcaagctggccaaggacgaaaaactggtcggcctggagcgtgtgcaggagccttcggaagtcgaaggtgaagagctcgaaggtgaggaatttgaaggcgaggtgatcgcagccggcgatgacaacgttgacgagccaaccctcgacgctgccgcagacgaagaagaaccgcaggaataa
